(19) United States
(12) Patent Application Publication
(10) Pub. No.: US 2025/0283081 A1
(43) Pub. Date: Sep. 11, 2025

(54) Compounds and Methods for Modulating UBE3A-ATS

(71) Applicant: Ionis Pharmaceuticals, Inc., Carlsbad, CA (US)

(72) Inventors: Susan M. Freier, San Diego, CA (US); Huynh-Hoa Bui, San Diego, CA (US); Paymaan Jafar-nejad, Carlsbad, CA (US); Frank Rigo, Carlsbad, CA (US)

(73) Assignee: Ionis Pharmaceuticals, Inc., Carlsbad, CA (US)

(21) Appl. No.: 18/893,729

(22) Filed: Sep. 23, 2024

Related U.S. Application Data
(63) Continuation of application No. 17/576,245, filed on Jan. 14, 2022, now Pat. No. 12,129,466.
Application No. 17/576,245 is a continuation of application No. 17/236,671, filed on Apr. 21, 2021, now Pat. No. 11,261,446.
Application No. 17/236,671 is a continuation of application No. PCT/US20/25110, filed on Mar. 27, 2020.
(60) Provisional application No. 62/826,521, filed on Mar. 29, 2019.
(60) Provisional application No. 62/877,765, filed on Jul. 23, 2019.

(51) Int. Cl. C12N 15/113

(52) U.S. Cl. CPC C12N 15/113; C12N 2310/111; C12N 2310/113; C12N 2310/315; C12N 2310/321; C12N 2310/323; C12N 2310/3341; C12N 2310/341

(57) ABSTRACT

Provided are compounds, methods, and pharmaceutical compositions for reducing the amount or activity of UBE3A-ATS, the endogenous antisense transcript of ubiquitin protein ligase E3A (UBE3A) in a cell or subject, and in certain instances increasing the expression of paternal UBE3A and the amount of UBE3A protein in a cell or subject. Such compounds, methods, and pharmaceutical compositions are useful to ameliorate at least one symptom or hallmark of a neurogenetic disorder. Such symptoms and hallmarks include developmental delays, ataxia, speech impairment, sleep problems, seizures, and EEG abnormalities. Such neurogenetic disorders include Angelman Syndrome.

### SEQUENCE LISTING

[0001] The present application contains a Sequence Listing which has been submitted electronically in XML format. Said XML copy, created on Sep. 29, 2023, is named “BIOL0349SEQ.xml” and is 3,790,521 bytes in size. The information in the electronic format of the sequence listing is incorporated herein by reference in its entirety.

### FIELD

[0002] Provided are compounds, methods, and pharmaceutical compositions for reducing the amount or activity of UBE3A-ATS, the endogenous antisense transcript of ubiquitin protein ligase E3A (UBE3A) in a cell or subject, and in certain instances increasing the expression of paternal UBE3A and the amount of UBE3A protein in a cell or subject. Such compounds, methods, and pharmaceutical compositions are useful to ameliorate at least one symptom or hallmark of a neurogenetic disorder. Such symptoms and hallmarks include developmental delays, ataxia, speech impairment, sleep problems, seizures, and EEG abnormalities. Such neurogenetic disorders include

[0003] Angelman Syndrome.

### BACKGROUND

[0004] Angelman Syndrome (AS) is a developmental disorder that affects ˜1/15,000 live births and is caused by a deficiency of ubiquitin protein ligase E3A (UBE3A). Of the two copies of the UBE3A gene in neurons, the maternal gene is typically expressed, while the paternal gene is subject to genetic imprinting and silencing. Angelman Syndrome is caused when a functional copy of the UBE3A gene is not inherited from the mother, either because of a mutation, a deletion, paternal uniparental disomy of chromosome 15, or an imprinting defect. See, Buiting, et al., “Angelman Syndrome-insights into a rare neurogenetic disorder”, Nature Rev. Neuro., 2016, 12:584-593.

[0005] Angelman Syndrome patients experience developmental delays and speech impairment, and commonly experience sleep problems, seizures, and EEG abnormalities. The disorder is usually diagnosed in the first few years of life and the diagnosis can be confirmed by genetic testing. However, therapies for Angelman Syndrome remain limited and focus mainly on symptomatic management. See, Williams, C. A. et al., Genet. Med., 12:385-395, 2010.

[0006] Recently, topoisomerase inhibitors currently used in cancer treatment were found to “unsilence” paternal UBE3A expression in both a neuronal culture system and mice. See, Huang, H. S. et al., Nature, 481:185-189, 2012. However, the exact mechanism of unsilencing paternal UBE3A expression remains unknown and topoisomerase inhibitors are fraught with safety concerns because they are known to be non-specific and capable of inducing DNA damage, such as single and double-strand breaks.

[0007] Currently there is a lack of acceptable options for treating neurogenetic disorders such as AS. It is therefore an object herein to provide compounds, methods, and pharmaceutical compositions for the treatment of such diseases.

### SUMMARY OF THE INVENTION

[0008] Provided herein are compounds, methods and pharmaceutical compositions for reducing the amount or activity of UBE3A-ATS RNA, and in certain embodiments increasing the expression of paternal UBE3A RNA or protein in a cell or subject. In certain embodiments, the subject has a neurogenetic disorder. In certain embodiments, the subject has Angelman Syndrome (AS). In certain embodiments, compounds useful for reducing expression of UBE3A-ATS RNA, or a portion thereof, are oligomeric compounds. In certain embodiments, compounds useful for reducing expression of UBE3A-ATS RNA, or a portion thereof, are modified oligonucleotides. In certain embodiments, compounds useful for increasing expression of paternal UBE3A RNA or protein are oligomeric compounds. In certain embodiments, compounds useful for increasing expression of paternal UBE3A RNA or protein are modified oligonucleotides.

[0009] Also provided are methods useful for ameliorating at least one symptom or hallmark of a neurogenetic disorder. In certain embodiments, the neurogenetic disorder is Angelman Syndrome. In certain embodiments, the symptom or hallmark includes developmental delays, ataxia, speech impairment, sleep problems, seizures, and/or EEG abnormalities.

### DETAILED DESCRIPTION OF THE INVENTION

[0010] It is to be understood that both the foregoing general description and the following detailed description are exemplary and explanatory only and are not restrictive. Herein, the use of the singular includes the plural unless specifically stated otherwise. As used herein, the use of “or” means “and/or” unless stated otherwise. Furthermore, the use of the term “including” as well as other forms, such as “includes” and “included”, is not limiting. Also, terms such as “element” or “component” encompass both elements and components comprising one unit and elements and components that comprise more than one subunit, unless specifically stated otherwise.

[0011] The section headings used herein are for organizational purposes only and are not to be construed as limiting the subject matter described. All documents, or portions of documents, cited in this application, including, but not limited to, patents, patent applications, articles, books, and treatises, are hereby expressly incorporated-by-reference for the portions of the document discussed herein, as well as in their entirety.

### Definitions

[0012] Unless specific definitions are provided, the nomenclature used in connection with, and the procedures and techniques of, analytical chemistry, synthetic organic chemistry, and medicinal and pharmaceutical chemistry described herein are those well-known and commonly used in the art. Where permitted, all patents, applications, published applications and other publications and other data referred to throughout in the disclosure are incorporated by reference herein in their entirety.

[0013] Unless otherwise indicated, the following terms have the following meanings:

### Definitions

[0014] As used herein, “2′-deoxynucleoside” means a nucleoside comprising a 2-H(H) deoxyribosyl sugar moiety. In certain embodiments, a 2′-deoxynucleoside is a 2-β-D-deoxynucleoside and comprises a 2′-β-D-deoxyribosyl sugar moiety, which has the β-D configuration as found in naturally occurring deoxyribonucleic acids (DNA). In certain embodiments, a 2′-deoxynucleoside may comprise a modified nucleobase or may comprise an RNA nucleobase (uracil).

[0015] As used herein, “2′-MOE” or “2”-MOE sugar moiety” means a 2′-OCH CH2OCH3 group in place of the 2′-OH group of a ribosyl sugar moiety. “MOE” means methoxyethyl. Unless otherwise indicated, a 2′-MOE has the β-D stereochemical configuration.

[0016] As used herein, “2′-MOE nucleoside” means a nucleoside comprising a 2′-MOE sugar moiety.

[0017] As used herein, “2′-OMe” or “2”-O-methyl sugar moiety” means a 2′-OCH3 group in place of the 2′-OH group of a ribosyl sugar moiety. Unless otherwise indicated, a 2′-OMe has the β-D stereochemical configuration.

[0018] As used herein, “2′-OMe nucleoside” means a nucleoside comprising a 2′-OMe sugar moiety.

[0019] As used herein, “2′-substituted nucleoside” means a nucleoside comprising a 2′-substituted sugar moiety.

[0020] As used herein, “2′-substituted” in reference to a sugar moiety means a sugar moiety comprising at least one 2′-substituent group other than H or OH.

[0021] As used herein, “5-methyl cytosine” means a cytosine modified with a methyl group attached to the 5 position. A 5-methyl cytosine is a modified nucleobase.

[0022] As used herein, “administering” means providing a pharmaceutical agent to a subject.

[0023] As used herein, “antisense activity” means any detectable and/or measurable change attributable to the hybridization of an antisense compound to its target nucleic acid. In certain embodiments, antisense activity is a decrease in the amount or expression of a target nucleic acid or protein encoded by such target nucleic acid compared to target nucleic acid levels or target protein levels in the absence of the antisense compound.

[0024] As used herein, “antisense compound” means an oligomeric compound capable of achieving at least one antisense activity.

[0025] As used herein, “ameliorate” in reference to a treatment means improvement in at least one symptom relative to the same symptom in the absence of the treatment. In certain embodiments, amelioration is the reduction in the severity or frequency of a symptom or the delayed onset or slowing of progression in the severity or frequency of a symptom. In certain embodiments, the symptom or hallmark is developmental delays, ataxia, speech impairment, sleep problems, seizures, and EEG abnormalities.

[0026] As used herein, “bicyclic nucleoside” or “BNA” means a nucleoside comprising a bicyclic sugar moiety.

[0027] As used herein, “bicyclic sugar” or “bicyclic sugar moiety” means a modified sugar moiety comprising two rings, wherein the second ring is formed via a bridge connecting two of the atoms thereby forming a bicyclic structure. In certain embodiments, the first ring of the bicyclic sugar moiety is a furanosyl moiety. In certain embodiments, the bicyclic sugar moiety does not comprise a furanosyl moiety.

[0028] As used herein, “cleavable moiety” means a bond or group of atoms that is cleaved under physiological conditions, for example, inside a cell, a subject, or a human.

[0029] As used herein, “complementary” in reference to an oligonucleotide means that at least 70% of the nucleobases of the oligonucleotide or one or more portions thereof and the nucleobases of a target nucleic acid or one or more portions thereof are capable of hydrogen bonding with one another when the nucleobase sequence of the oligonucleotide and the other nucleic acid are aligned in opposing directions. As used herein, complementary nucleobases means nucleobases that are capable of forming hydrogen bonds with one another. Complementary nucleobase pairs include adenine (A) and thymine (T), adenine (A) and uracil (U), cytosine (C) and guanine (G), 5-methyl cytosine (mC) and guanine (G). Complementary oligonucleotides and/or target nucleic acids need not have nucleobase complementarity at each nucleoside. Rather, some mismatches are tolerated. As used herein, “fully complementary” or “100% complementary” in reference to an oligonucleotide, or portion thereof, means that the oligonucleotide, or portion thereof, is complementary to another oligonucleotide or target nucleic acid at each nucleobase of the shorter of the two oligonucleotides, or at each nucleoside if the oligonucleotides are the same length.

[0030] As used herein, “conjugate group” means a group of atoms that is directly or indirectly attached to an oligonucleotide. Conjugate groups include a conjugate moiety and a conjugate linker that attaches the conjugate moiety to the oligonucleotide.

[0031] As used herein, “conjugate linker” means a single bond or a group of atoms comprising at least one bond that connects a conjugate moiety to an oligonucleotide.

[0032] As used herein, “conjugate moiety” means a group of atoms that is attached to an oligonucleotide via a conjugate linker.

[0033] As used herein, “contiguous” in the context of an oligonucleotide refers to nucleosides, nucleobases, sugar moieties, or internucleoside linkages that are immediately adjacent to each other. For example, “contiguous nucleobases” means nucleobases that are immediately adjacent to each other in a sequence.

[0034] As used herein, “constrained ethyl” or “cEt” or “cEt modified sugar moiety” means a β-D ribosyl bicyclic sugar moiety wherein the second ring of the bicyclic sugar is formed via a bridge connecting the 4′-carbon and the 2′-carbon of the β-D ribosyl sugar moiety, wherein the bridge has the formula 4′-CH(CH₃)—O-2′, and wherein the methyl group of the bridge is in the S configuration.

[0035] As used herein, “cEt nucleoside” means a nucleoside comprising a cEt modified sugar moiety.

[0036] As used herein, “chirally enriched population” means a plurality of molecules of identical molecular formula, wherein the number or percentage of molecules within the population that contain a particular stereochemical configuration at a particular chiral center is greater than the number or percentage of molecules expected to contain the same particular stereochemical configuration at the same particular chiral center within the population if the particular chiral center were stereorandom. Chirally enriched populations of molecules having multiple chiral centers within each molecule may contain one or more stereorandom chiral centers. In certain embodiments, the molecules are modified oligonucleotides. In certain embodiments, the molecules are compounds comprising modified oligonucleotides.

[0037] As used herein, “gapmer” means a modified oligonucleotide comprising an internal region having a plurality of nucleosides that support RNase H cleavage positioned between external regions having one or more nucleosides, wherein the nucleosides comprising the internal region are chemically distinct from the nucleoside or nucleosides comprising the external regions. The internal region may be referred to as the “gap” and the external regions may be referred to as the “wings.” Unless otherwise indicated, “gapmer” refers to a sugar motif. Unless otherwise indicated, the sugar moiety of each nucleoside of the gap is a 2′-β-D-deoxyribosyl sugar moiety. Thus, the term “MOE gapmer” indicates a gapmer having a gap comprising 2-β-D-deoxynucleosides and wings comprising 2-MOE nucleosides. Unless otherwise indicated, a MOE gapmer may comprise one or more modified internucleoside linkages and/or modified nucleobases and such modifications do not necessarily follow the gapmer pattern of the sugar modifications.

[0038] As used herein, “hotspot region” is a range of nucleobases on a target nucleic acid that is amenable to oligomeric compound-mediated reduction of the amount or activity of the target nucleic acid.

[0039] As used herein, “hybridization” means the pairing or annealing of complementary oligonucleotides and/or nucleic acids. While not limited to a particular mechanism, the most common mechanism of hybridization involves hydrogen bonding, which may be Watson-Crick, Hoogsteen or reversed Hoogsteen hydrogen bonding, between complementary nucleobases.

[0040] As used herein, “internucleoside linkage” means the covalent linkage between contiguous nucleosides in an oligonucleotide. As used herein, “modified internucleoside linkage” means any internucleoside linkage other than a phosphodiester internucleoside linkage. “Phosphorothioate internucleoside linkage” is a modified internucleoside linkage in which one of the non-bridging oxygen atoms of a phosphodiester internucleoside linkage is replaced with a sulfur atom.

[0041] As used herein, “linker-nucleoside” means a nucleoside that links, either directly or indirectly, an oligonucleotide to a conjugate moiety. Linker-nucleosides are located within the conjugate linker of an oligomeric compound. Linker-nucleosides are not considered part of the oligonucleotide portion of an oligomeric compound even if they are contiguous with the oligonucleotide.

[0042] As used herein, “non-bicyclic modified sugar moiety” means a modified sugar moiety that comprises a modification, such as a substituent, that does not form a bridge between two atoms of the sugar to form a second ring.

[0043] As used herein, “mismatch” or “non-complementary” means a nucleobase of a first oligonucleotide that is not complementary with the corresponding nucleobase of a second oligonucleotide or target nucleic acid when the first and second oligonucleotide are aligned.

[0044] As used herein, “motif” means the pattern of unmodified and/or modified sugar moieties, nucleobases, and/or internucleoside linkages, in an oligonucleotide.

[0045] As used herein, “neurogenetic disorder” means a condition of the nervous system caused by a heritable genetic factor, including, but not limited to, a mutation, a deletion, uniparental disomy, or an imprinting defect.

[0046] As used herein, “nucleobase” means an unmodified nucleobase or a modified nucleobase. As used herein an “unmodified nucleobase” is adenine (A), thymine (T), cytosine (C), uracil (U), or guanine (G). As used herein, a “modified nucleobase” is a group of atoms other than unmodified A, T, C, U, or G capable of pairing with at least one unmodified nucleobase. A “5-methyl cytosine” is a modified nucleobase. A universal base is a modified nucleobase that can pair with any one of the five unmodified nucleobases. As used herein, “nucleobase sequence” means the order of contiguous nucleobases in a target nucleic acid or oligonucleotide independent of any sugar or internucleoside linkage modification.

[0047] As used herein, “nucleoside” means a compound comprising a nucleobase and a sugar moiety. The nucleobase and sugar moiety are each, independently, unmodified or modified. As used herein, “modified nucleoside” means a nucleoside comprising a modified nucleobase and/or a modified sugar moiety. Modified nucleosides include abasic nucleosides, which lack a nucleobase. “Linked nucleosides” are nucleosides that are connected in a contiguous sequence (i.e., no additional nucleosides are presented between those that are linked).

[0048] As used herein, “oligomeric compound” means an oligonucleotide and optionally one or more additional features, such as a conjugate group or terminal group. An oligomeric compound may be paired with a second oligomeric compound that is complementary to the first oligomeric compound or may be unpaired. A “singled-stranded oligomeric compound” is an unpaired oligomeric compound. The term “oligomeric duplex” means a duplex formed by two oligomeric compounds having complementary nucleobase sequences. Each oligomeric compound of an oligomeric duplex may be referred to as a “duplexed oligomeric compound.”

[0049] As used herein, “oligonucleotide” means a strand of linked nucleosides connected via internucleoside linkages, wherein each nucleoside and internucleoside linkage may be modified or unmodified. Unless otherwise indicated, oligonucleotides consist of 8-50 linked nucleosides. As used herein, “modified oligonucleotide” means an oligonucleotide, wherein at least one nucleoside or internucleoside linkage is modified. As used herein, “unmodified oligonucleotide” means an oligonucleotide that does not comprise any nucleoside modifications or internucleoside modifications.

[0050] As used herein, “pharmaceutically acceptable carrier or diluent” means any substance suitable for use in administering to a subject. Certain such carriers enable pharmaceutical compositions to be formulated as, for example, tablets, pills, dragees, capsules, liquids, gels, syrups, slurries, suspension and lozenges for the oral ingestion by a subject. In certain embodiments, a pharmaceutically acceptable carrier or diluent is sterile water, sterile saline, sterile buffer solution or sterile artificial cerebrospinal fluid.

[0051] As used herein, “pharmaceutically acceptable salts” means physiologically and pharmaceutically acceptable salts of compounds. Pharmaceutically acceptable salts retain the desired biological activity of the parent compound and do not impart undesired toxicological effects thereto.

[0052] As used herein, “pharmaceutical composition” means a mixture of substances suitable for administering to a subject. For example, a pharmaceutical composition may comprise an oligomeric compound and a sterile aqueous solution. In certain embodiments, a pharmaceutical composition shows activity in free uptake assay in certain cell lines.

[0053] As used herein, “prodrug” means a therapeutic agent in a form outside the body that is converted to a different form within a subject or cells thereof. Typically, conversion of a prodrug within the subject is facilitated by the action of an enzymes (e.g., endogenous or viral enzyme) or chemicals present in cells or tissues and/or by physiologic conditions.

[0054] As used herein, “reducing or inhibiting the amount or activity”, “reducing the amount or activity”, or “inhibiting the amount or activity” refers to a reduction or blockade of the transcriptional expression or activity relative to the transcriptional expression or activity in an untreated or control sample and does not necessarily indicate a total elimination of transcriptional expression or activity.

[0055] As used herein, “RNA” means any RNA transcript, including endogenous antisense transcripts that do not encode a protein (e.g., UBE3A-ATS), and also includes pre-mRNA and mature mRNA unless otherwise specified.

[0056] As used herein, “RNAi compound” means an antisense compound that acts, at least in part, through RISC or Ago2 to modulate a target nucleic acid and/or protein encoded by a target nucleic acid. RNAi compounds include, but are not limited to double-stranded siRNA, single-stranded RNA (ssRNA), and microRNA, including microRNA mimics. In certain embodiments, an RNAi compound modulates the amount, activity, and/or splicing of a target nucleic acid. The term RNAi compound excludes antisense compounds that act through RNase H.

[0057] As used herein, “self-complementary” in reference to an oligonucleotide means an oligonucleotide that at least partially hybridizes to itself.

[0058] As used herein, “standard cell assay” means the assay described in Example 1 and reasonable variations thereof.

[0059] As used herein, “stereorandom chiral center” in the context of a population of molecules of identical molecular formula means a chiral center having a random stereochemical configuration. For example, in a population of molecules comprising a stereorandom chiral center, the number of molecules having the(S) configuration of the stereorandom chiral center may be but is not necessarily the same as the number of molecules having the (R) configuration of the stereorandom chiral center. The stereochemical configuration of a chiral center is considered random when it is the result of a synthetic method that is not designed to control the stereochemical configuration. In certain embodiments, a stereorandom chiral center is a stereorandom phosphorothioate internucleoside linkage.

[0060] As used herein, “subject” means a human or non-human animal.

[0061] As used herein, “sugar moiety” means an unmodified sugar moiety or a modified sugar moiety. As used herein, “unmodified sugar moiety” means a 2′-OH(H) β-D-ribosyl moiety, as found in RNA (an “unmodified RNA sugar moiety”), or a 2-H(H) β-D-deoxyribosyl sugar moiety, as found in DNA (an “unmodified DNA sugar moiety”). Unmodified sugar moieties have one hydrogen at each of the 1′, 3′, and 4 positions, an oxygen at the 3′ position, and two hydrogens at the 5′ position. As used herein, “modified sugar moiety” or “modified sugar” means a modified furanosyl sugar moiety or a sugar surrogate.

[0062] As used herein, “sugar surrogate” means a modified sugar moiety having other than a furanosyl moiety that can link a nucleobase to another group, such as an internucleoside linkage, conjugate group, or terminal group in an oligonucleotide. Modified nucleosides comprising sugar surrogates can be incorporated into one or more positions within an oligonucleotide and such oligonucleotides are capable of hybridizing to complementary oligomeric compounds or target nucleic acids.

[0063] As used herein, “symptom or hallmark” means any physical feature or test result that indicates the existence or extent of a disease or disorder. In certain embodiments, a symptom is apparent to a subject or to a medical professional examining or testing said subject. In certain embodiments, a hallmark is apparent upon invasive diagnostic testing, including, but not limited to, post-mortem tests.

[0064] As used herein, “target nucleic acid” and “target RNA” mean a nucleic acid that an antisense compound is designed to affect.

[0065] As used herein, “target region” means a portion of a target nucleic acid to which an oligomeric compound is designed to hybridize.

[0066] As used herein, “terminal group” means a chemical group or group of atoms that is covalently linked to a terminus of an oligonucleotide.

[0067] As used herein, “therapeutically effective amount” means an amount of a pharmaceutical agent that provides a therapeutic benefit to a subject. For example, a therapeutically effective amount improves a symptom or hallmark of a disease.

### Certain Embodiments

[0068] The present disclosure provides the following non-limiting numbered embodiments:

[0069] Embodiment 1. An oligomeric compound comprising a modified oligonucleotide consisting of 12 to 30 linked nucleosides wherein the nucleobase sequence of the modified oligonucleotide is at least 90% complementary to an equal length portion of a UBE3A-ATS RNA, and wherein the modified oligonucleotide comprises at least one modification selected from a modified sugar moiety and a modified internucleoside linkage.

[0070] Embodiment 2. An oligomeric compound comprising a modified oligonucleotide consisting of 12 to 30 linked nucleosides and having a nucleobase sequence comprising at least 12, 13, 14, 15, 16, 17, 18, 19, or 20 contiguous nucleobases of any of SEQ ID NOs: 17-2762, 2786-2863, 2872-2904.

[0071] Embodiment 3. An oligomeric compound comprising a modified oligonucleotide consisting of 12 to 30 linked nucleosides and having a nucleobase sequence comprising at least 12, 13, 14, 15, 16, 17, or 18 contiguous nucleobases of any of SEQ ID NOs: 2763-2785 or 2864-2871.

[0072] Embodiment 4. An oligomeric compound comprising a modified oligonucleotide consisting of 12 to 30 linked nucleosides and having a nucleobase sequence comprising at least 8, at least 9, at least 10, at least 11, at least 12, at least 13, at least 14, at least 15, at least 16, at least 17, at least 18, at least 19, or at least 20 contiguous nucleobases complementary to:
[0073] an equal length portion of nucleobases 461,413-461,487 of SEQ ID NO: 1:
[0074] an equal length portion of nucleobases 468,968-469,013 of SEQ ID NO: 1; or
[0075] an equal length portion of nucleobases 483,965-484,003 of SEQ ID NO: 1

[0076] Embodiment 5. An oligomeric compound comprising a modified oligonucleotide consisting of 12 to 30 linked nucleosides and having a nucleobase sequence comprising at least 8, at least 9, at least 10, at least 11, at least 12, at least 13, at least 14, at least 15, at least 16, at least 17, or at least 18 contiguous nucleobases of a sequence selected from:
[0077] SEQ ID Nos: 1053, 1329, 1501, 1576, 1873, 1949, 2025, 2096, 2245, 2512, 2591, 2680-2682, and 2844;
[0078] SEQ ID Nos: 376, 377, 2751-2756, 2773-2776, 2872, 2873, 2876-2878; or
[0079] SEQ ID Nos: 172, 764-770, 995, 1445, 1668, 1743, 2255, 2595, 2762-2767.

[0080] Embodiment 6. The oligomeric compound of any of embodiments 1-5, wherein the modified oligonucleotide has a nucleobase sequence that is at least 80%, 85%, 90%, 95%, or 100% complementary to the nucleobase sequence of SEQ ID NO: 1, SEQ ID NO: 2915, or SEQ ID NO: 2916 when measured across the entire nucleobase sequence of the modified oligonucleotide.

[0081] Embodiment 7. The oligomeric compound of any of embodiments 1-6, wherein the modified oligonucleotide comprises at least one modified nucleoside.

[0082] Embodiment 8. The oligomeric compound of embodiment 7, wherein the modified oligonucleotide comprises at least one modified nucleoside comprising a modified sugar moiety.

[0083] Embodiment 9. The oligomeric compound of embodiment 8, wherein the modified oligonucleotide comprises at least one modified nucleoside comprising a bicyclic sugar moiety.

[0084] Embodiment 10. The oligomeric compound of embodiment 9, wherein the modified oligonucleotide comprises at least one modified nucleoside comprising a bicyclic sugar moiety having a 2′-4 bridge, wherein the 2′-4 bridge is selected from —O—CH₂—; and —O—CH(CH₃)—.

[0085] Embodiment 11. The oligomeric compound of any of embodiments 7-10, wherein the modified oligonucleotide comprises at least one modified nucleoside comprising a non-bicyclic modified sugar moiety.

[0086] Embodiment 12. The oligomeric compound of embodiment 11, wherein the non-bicyclic modified sugar moiety is a 2′-MOE modified sugar moiety or 2′-OMe modified sugar moiety.

[0087] Embodiment 13. The oligomeric compound of any of embodiments 7-8, wherein the modified oligonucleotide comprises at least one modified nucleoside comprising a sugar surrogate.

[0088] Embodiment 14. The oligomeric compound of embodiment 13, wherein the modified oligonucleotide comprises at least one modified nucleoside comprising a sugar surrogate selected from morpholino and PNA.

[0089] Embodiment 15. The oligomeric compound of any of embodiments 1-8 or 11-14, wherein the modified oligonucleotide does not comprise a bicyclic sugar moiety.

[0090] Embodiment 16. The oligomeric compound of any of embodiments 1-15, wherein the modified oligonucleotide is a gapmer.

[0091] Embodiment 17. The oligomeric compound of any of embodiments 1-16, wherein the modified oligonucleotide has a sugar motif comprising:
[0092] a 5′-region consisting of 1-6 linked 5′-region nucleosides;
[0093] a central region consisting of 6-10 linked central region nucleosides; and
[0094] a 3′-region consisting of 1-6 linked 3′-region nucleosides; wherein
[0095] each of the 5′-region nucleosides and each of the 3′-region nucleosides comprises a modified sugar moiety and each of the central region nucleosides comprises a 2-β-D-deoxyribosyl sugar moiety.

[0096] Embodiment 18. The oligomeric compound of embodiment 17, wherein the modified oligonucleotide has
[0097] a 5′-region consisting of 5 linked 5′-region nucleosides;
[0098] a central region consisting of 10 linked central region nucleosides; and
[0099] a 3-region consisting of 5 linked 3-region nucleosides; wherein
[0100] each of the 5′-region nucleosides and each of the 3′-region nucleosides comprises a 2′-MOE modified sugar moiety, and each of the central region nucleosides comprises a 2-β-D-deoxyribosyl sugar moiety.

[0101] Embodiment 19. The oligomeric compound of embodiment 17, wherein the modified oligonucleotide has
[0102] a 5′-region consisting of 4 linked 5′-region nucleosides;
[0103] a central region consisting of 10 linked central region nucleosides; and
[0104] a 3′-region consisting of 6 linked 3′-region nucleosides; wherein
[0105] each of the 5′-region nucleosides and each of the 3′-region nucleosides a 2′-MOE modified sugar moiety, and each of the central region nucleosides comprises a 2′-β-D-deoxyribosyl sugar moiety.

[0106] Embodiment 20. The oligomeric compound of embodiment 17, wherein the modified oligonucleotide has
[0107] a 5′-region consisting of 6 linked 5′-region nucleosides:
[0108] a central region consisting of 10 linked central region nucleosides; and
[0109] a 3-region consisting of 4 linked 3′-region nucleosides; wherein
[0110] each of the 5′-region nucleosides and each of the 3′-region nucleosides a 2′-MOE modified sugar moiety, and each of the central region nucleosides comprises a 2′-β-D-deoxyribosyl sugar moiety.

[0111] Embodiment 21. The oligomeric compound of embodiment 17, wherein the modified oligonucleotide has
[0112] a 5′-region consisting of 5 linked 5′-region nucleosides;
[0113] a central region consisting of 8 linked central region nucleosides; and
[0114] a 3-region consisting of 5 linked 3′-region nucleosides; wherein
[0115] each of the 5′-region nucleosides and each of the 3′-region nucleosides a 2′-MOE modified sugar moiety, and each of the central region nucleosides comprises a 2′-β-D-deoxyribosyl sugar moiety.

[0116] Embodiment 22. The oligomeric compound of embodiment 17, wherein the modified oligonucleotide has
[0117] a 5′-region consisting of 4 linked 5′-region nucleosides;
[0118] a central region consisting of 8 linked central region nucleosides; and
[0119] a 3-region consisting of 6 linked 3′-region nucleosides; wherein
[0120] each of the 5′-region nucleosides and each of the 3′-region nucleosides a 2′-MOE modified sugar moiety, and each of the central region nucleosides comprises a 2-β-D-deoxyribosyl sugar moiety.

[0121] Embodiment 23. The oligomeric compound of embodiment 17, wherein the modified oligonucleotide has
[0122] a 5′-region consisting of 4 linked 5′-region nucleosides;
[0123] a central region consisting of 8 linked central region nucleosides; and
[0124] a 3-region consisting of 6 linked 3′-region nucleosides; wherein
[0125] each of the 5′-region nucleosides and each of the 3′-region nucleosides a 2′-MOE modified sugar moiety, and each of the central region nucleosides comprises a 2′-β-D-deoxyribosyl sugar moiety.

[0126] Embodiment 24. The oligomeric compound of any of embodiments 1-23, wherein the modified oligonucleotide comprises at least one modified internucleoside linkage.

[0127] Embodiment 25. The oligomeric compound of embodiment 24, wherein each internucleoside linkage of the modified oligonucleotide is a modified internucleoside linkage.

[0128] Embodiment 26. The oligomeric compound of embodiment 24 or 25 wherein the modified internucleoside linkage is a phosphorothioate internucleoside linkage.

[0129] Embodiment 27. The oligomeric compound of embodiment 24 or 26 wherein the modified oligonucleotide comprises at least one phosphodiester internucleoside linkage.

[0130] Embodiment 28. The oligomeric compound of any of embodiments 24, 26, or 27, wherein each internucleoside linkage is independently selected from a phosphodiester internucleoside linkage or a phosphorothioate internucleoside linkage.

[0131] Embodiment 29. The oligomeric compound of embodiments 1-24 or 27-28, wherein the modified oligonucleotide has an internucleoside linkage motif selected from among: soooossssssssssooss, sooooossssssssssoss, soooosssssssssoss, sooosssssssssooss, sooossssssssssoooss, or soosssssssssoooss; wherein, s=a phosphorothioate internucleoside linkage and o=a phosphodiester internucleoside linkage.

[0132] Embodiment 30. The oligomeric compound of any of embodiments 1-29, wherein the modified oligonucleotide comprises a modified nucleobase.

[0133] Embodiment 31. The oligomeric compound of embodiment 30, wherein the modified nucleobase is a 5-methyl cytosine.

[0134] Embodiment 32. The oligomeric compound of any of embodiments 1-31, wherein the modified oligonucleotide consists of 12-30, 12-22, 12-20,14-18, 14-20, 15-17, 15-25, 16-20, 18-22 or 18-20 linked nucleosides.

[0135] Embodiment 33. The oligomeric compound of any of embodiments 1-32, wherein the modified oligonucleotide consists of 18 linked nucleosides.

[0136] Embodiment 34. The oligomeric compound of any of embodiments 1-2, 4, or 6-32, wherein the modified oligonucleotide consists of 20 linked nucleosides.

[0137] Embodiment 35. The oligomeric compound of any of embodiments 1-34, consisting of the modified oligonucleotide.

[0138] Embodiment 36. The oligomeric compound of any of embodiments 1-34, comprising a conjugate group comprising a conjugate moiety and a conjugate linker.

[0139] Embodiment 37. The oligomeric compound of embodiment 36, wherein the conjugate linker consists of a single bond.

[0140] Embodiment 38. The oligomeric compound of embodiment 36, wherein the conjugate linker is cleavable.

[0141] Embodiment 39. The oligomeric compound of embodiment 36, wherein the conjugate linker comprises 1-3 linker-nucleosides.

[0142] Embodiment 40. The oligomeric compound of any of embodiments 36-39, wherein the conjugate group is attached to the modified oligonucleotide at the 5′-end of the modified oligonucleotide.

[0143] Embodiment 41. The oligomeric compound of any of embodiments 36-39, wherein the conjugate group is attached to the modified oligonucleotide at the 3′-end of the modified oligonucleotide.

[0144] Embodiment 42. The oligomeric compound of any of embodiments 1-34 or 36-41, comprising a terminal group.

[0145] Embodiment 43. The oligomeric compound of any of embodiments 1-42 wherein the oligomeric compound is a singled-stranded oligomeric compound.

[0146] Embodiment 44. The oligomeric compound of any of embodiments 1-38 or 40-43, wherein the oligomeric compound does not comprise linker-nucleosides.

[0147] Embodiment 45. An oligomeric duplex comprising an oligomeric compound of any of embodiments 1-42 or 44.

[0148] Embodiment 46. An antisense compound comprising or consisting of an oligomeric compound of any of embodiments 1-44 or an oligomeric duplex of embodiment 45.

[0149] Embodiment 47. A pharmaceutical composition comprising an oligomeric compound of any of embodiments 1-44 or an oligomeric duplex of embodiment 45 and a pharmaceutically acceptable carrier or diluent.

[0150] Embodiment 48. The pharmaceutical composition of embodiment 47, wherein the pharmaceutically acceptable diluent is artificial cerebral spinal fluid.

[0151] Embodiment 49. The pharmaceutical composition of embodiment 48, wherein the pharmaceutical composition consists essentially of the modified oligonucleotide and phosphate buffered saline.

[0152] Embodiment 50. A method comprising administering to a subject a pharmaceutical composition of any of embodiments 47-50.

[0153] Embodiment 51. A method of treating a disease associated with UBE3A-ATS comprising administering to an individual having or at risk for developing a disease associated with UBE3A-ATS a therapeutically effective amount of a pharmaceutical composition according to any of embodiments 47-49; and thereby treating the disease associated with UBE3A-ATS.

[0154] Embodiment 52. The method of embodiment 51, wherein the UBE3A-ATS-associated disease is Angelman Syndrome.

[0155] Embodiment 53. The method of any of embodiments 50-52, wherein at least one symptom or hallmark of the UBE3A-ATS-associated disease is ameliorated.

[0156] Embodiment 54. The method of embodiment 53, wherein the symptom or hallmark is developmental delays, ataxia, speech impairment, sleep problems, seizures, or EEG abnormalities.

[0157] Embodiment 55. A modified oligonucleotide according to the following chemical structure:

[chemical structure]

[0158] Embodiment 56. A modified oligonucleotide according to the following chemical structure:

[chemical structure]

[0159] Embodiment 57. A modified oligonucleotide according to the following chemical structure:

[chemical structure]

[0160] Embodiment 58. A modified oligonucleotide according to the following chemical structure:

[chemical structure]

[0161] Embodiment 59. A modified oligonucleotide according to the following chemical structure:

[chemical structure]

[0162] Embodiment 60. A modified oligonucleotide corresponding to the following chemical structure:

[chemical structure]

[0163] Embodiment 61. A modified oligonucleotide according to the following chemical structure:

[chemical structure]

[0164] Embodiment 62. A modified oligonucleotide according to the following chemical structure:

[chemical structure]

Embodiment 63. A modified oligonucleotide according to the following chemical structure:

[chemical structure]

[0165] Embodiment 64. A modified oligonucleotide according to the following chemical structure:

[chemical structure]

[0166] Embodiment 65. A modified oligonucleotide according to the following chemical structure:

[chemical structure]

[0167] Embodiment 66. A modified oligonucleotide according to the following chemical structure:

[chemical structure]

[0168] Embodiment 67. The modified oligonucleotide of any of embodiments 55, 57, 59, 61, 63, or 65, which is a sodium salt of the chemical structure.

[0169] Embodiment 68. A pharmaceutical composition comprising the modified oligonucleotide of any of embodiments 55-67 and a pharmaceutically acceptable carrier or diluent.

[0170] Embodiment 69. The pharmaceutical composition of embodiment 68, wherein the pharmaceutically acceptable diluent is artificial cerebrospinal fluid.

[0171] Embodiment 70. The pharmaceutical composition of embodiment 69, wherein the pharmaceutical composition consists essentially of the modified oligonucleotide and artificial cerebrospinal fluid.

[0172] Embodiment 71. A compound comprising a modified oligonucleotide according to the following chemical notation: ^{m}CₑₛAₑₒTₑₒ^{m}CₑₒAₑₒT_{ds}G_{ds}A_{ds}T_{ds}^{m}C_{ds}T_{ds}T_{ds}G_{ds}G_{ds}T_{ds}AₑₒAₑₒGₑₛGₑₛ^{m}Cₑ (SEQ ID NO: 2917), wherein:
[0173] A=an adenine nucleobase,
[0174] mC=a 5-methyl cytosine nucleobase,
[0175] G=a guanine nucleobase,
[0176] T=a thymine nucleobase,
[0177] e=a 2′-MOE sugar moiety,
[0178] d=a 2′-β-D-deoxyribosyl sugar moiety,
[0179] s=a phosphorothioate internucleoside linkage, and
[0180] o=a phosphodiester internucleoside linkage.

[0181] Embodiment 72. A compound comprising a modified oligonucleotide according to the following chemical notation: Tₑₛ^{m}CₑₒAₑₒ^{m}Cₑₒ^{m}CₑₒAₑₒT_{ds}T_{ds}T_{ds}T_{ds}G_{ds}A_{ds}^{m}C_{ds}^{m}C_{ds}T_{ds}T_{ds}^{m}CₑₒTₑₛTₑₛAₑ (SEQ ID NO: 2918), wherein:
[0182] A=an adenine nucleobase,
[0183] mC=a 5-methyl cytosine nucleobase,
[0184] G=a guanine nucleobase,
[0185] T=a thymine nucleobase,
[0186] e=a 2′-MOE sugar moiety,
[0187] d=a 2′-β-D-deoxyribosyl sugar moiety,
[0188] s=a phosphorothioate internucleoside linkage, and
[0189] o=a phosphodiester internucleoside linkage.

[0190] Embodiment 73. A compound comprising a modified oligonucleotide according to the following chemical notation: TₑₛTₑₒ^{m}CₑₒAₑₒ^{m}Cₑₒ^{m}CₑₒA_{ds}T_{ds}T_{ds}T_{ds}T_{ds}G_{ds}A_{ds}^{m}C_{ds}^{m}C_{ds}T_{ds}Tₑₒ^{m}CₑₛTₑₛTₑ (SEQ ID NO: 2919), wherein:
[0191] A=an adenine nucleobase,
[0192] mC=a 5-methyl cytosine nucleobase,
[0193] G=a guanine nucleobase,
[0194] T=a thymine nucleobase,
[0195] e=a 2′-MOE sugar moiety,
[0196] d=a 2′-β-D-deoxyribosyl sugar moiety,
[0197] s=a phosphorothioate internucleoside linkage, and
[0198] o=a phosphodiester internucleoside linkage.

[0199] Embodiment 74. A compound comprising a modified oligonucleotide according to the following chemical notation: Gₑₛ^{m}CₑₒAₑₒTₑₒAₑₒ^{m}Cₑₒ^{m}C_{ds}^{m}C_{ds}A_{ds}G_{ds}G_{ds}G_{ds}T_{ds}A_{ds}G_{ds}G_{ds}AₑₒTₑₛTₑₛ^{m}Cₑ (SEQ ID NO: 2920), wherein:
[0200] A=an adenine nucleobase,
[0201] mC=a 5-methyl cytosine nucleobase,
[0202] G=a guanine nucleobase,
[0203] T=a thymine nucleobase,
[0204] e=a 2′-MOE sugar moiety,
[0205] d=a 2′-β-D-deoxyribosyl sugar moiety,
[0206] s=a phosphorothioate internucleoside linkage, and
[0207] o=a phosphodiester internucleoside linkage.

[0208] Embodiment 75. A compound comprising a modified oligonucleotide according to the following chemical notation: Aₑₛ^{m}CₑₒGₑₒ^{m}CₑₛA_{ds}A_{ds}T_{ds}G_{ds}T_{ds}A_{ds}T_{ds}^{m}C_{ds}AₑₒGₑₒGₑₒ^{m}CₑₛAₑₛAₑ (SEQ ID NO: 2921), wherein:
[0209] A=an adenine nucleobase,
[0210] mC=a 5-methyl cytosine nucleobase,
[0211] G=a guanine nucleobase,
[0212] T=a thymine nucleobase,
[0213] e=a 2′-MOE sugar moiety,
[0214] d=a 2′-β-D-deoxyribosyl sugar moiety,
[0215] s=a phosphorothioate internucleoside linkage, and
[0216] o=a phosphodiester internucleoside linkage.

[0217] Embodiment 76. A compound comprising a modified oligonucleotide according to the following chemical notation: Aₑₛ^{m}Cₑₒ^{m}CₑₒAₑₒTₑₒT_{ds}T_{ds}T_{ds}G_{ds}A_{ds}^{m}C_{ds}^{m}C_{ds}T_{ds}T_{ds}^{m}C_{ds}TₑₒTₑAₑₛGₑₛ^{m}Cₑ (SEQ ID NO: 2922), wherein:
[0218] A=an adenine nucleobase,
[0219] mC=a 5-methyl cytosine nucleobase,
[0220] G=a guanine nucleobase,
[0221] T=a thymine nucleobase,
[0222] e=a 2′-MOE sugar moiety,
[0223] d=a 2′-β-D-deoxyribosyl sugar moiety,
[0224] s=a phosphorothioate internucleoside linkage, and
[0225] o=a phosphodiester internucleoside linkage.

[0226] Embodiment 77. The compound of any of embodiments 71-76, comprising the modified oligonucleotide covalently linked to a conjugate group.

[0227] Embodiment 78. A pharmaceutical composition of any of embodiments 71-77, and a pharmaceutically acceptable diluent or carrier.

[0228] Embodiment 79. The pharmaceutical composition of embodiment 78, wherein the pharmaceutically acceptable diluent is artificial cerebrospinal fluid.

[0229] Embodiment 80. The pharmaceutical composition of embodiment 79, wherein the pharmaceutical composition consists essentially of the modified oligonucleotide and artificial cerebrospinal fluid.

[0230] Embodiment 81. A chirally enriched population of modified oligonucleotides of any of embodiments 55-67, wherein the population is enriched for modified oligonucleotides comprising at least one particular phosphorothioate internucleoside linkage having a particular setereochemical configuration.

[0231] Embodiment 82. The chirally enriched population of embodiment 81, wherein the population is enriched for modified oligonucleotides comprising at least one particular phorphorothioate internucleoside linkage having the (Sp) configuration.

[0232] Embodiment 83. The chirally enriched population of embodiment 81, wherein the population is enriched for modified oligonucleotides comprising at least one particular phorphorothioate internucleoside linkage having the (Rp) configuration.

[0233] Embodiment 84. The chirally enriched population of embodiment 81, wherein the population is enriched for modified oligonucleotides having a particular, independently selected stereochemical configuration at each phosphorothioate internucleoside linkage Embodiment 85. The chirally enriched population of embodiment 84, wherein the population is enriched for modified oligonucleotides having the (Sp) configuration at each phosphorothioate internucleoside linkage.

[0234] Embodiment 86. The chirally enriched population of embodiment 84, wherein the population is enriched for modified oligonucleotides having the (Rp) configuration at each phosphorothioate internucleoside linkage.

[0235] Embodiment 87. The chirally enriched population of embodiment 84, wherein the population is enriched for modified oligonucleotides having the (Rp) configuration at one particular phosphorothioate internucleoside linkage and the (Sp) configuration at each of the remaining phosphorothioate internucleoside linkages.

[0236] Embodiment 88. The chirally enriched population of embodiment 81 or embodiment 84 wherein the population is enriched for modified oligonucleotides having at least 3 contiguous phosphorothioate internucleoside linkages in the Sp, Sp, and Rp configurations, in the 5′ to 3′ direction.

[0237] Embodiment 89. A chirally enriched population of modified oligonucleotides of any of embodiments 55-67, wherein all of the phosphorothioate internucleoside linkages of the modified oligonucleotide are stereorandom.

### I. Certain Oligonucleotides

[0238] In certain embodiments, provided herein are oligomeric compounds comprising oligonucleotides, which consist of linked nucleosides. Oligonucleotides may be unmodified oligonucleotides (RNA or DNA) or may be modified oligonucleotides. Modified oligonucleotides comprise at least one modification relative to unmodified RNA or DNA. That is, modified oligonucleotides comprise at least one modified nucleoside (comprising a modified sugar moiety and/or a modified nucleobase) and/or at least one modified internucleoside linkage.

### A. Certain Modified Nucleosides

[0239] Modified nucleosides comprise a modified sugar moiety or a modified nucleobase or both a modified sugar moiety and a modified nucleobase.

### 1. Certain Sugar Moieties

[0240] In certain embodiments, modified sugar moieties are non-bicyclic modified sugar moieties. In certain embodiments, modified sugar moieties are bicyclic or tricyclic sugar moieties. In certain embodiments, modified sugar moieties are sugar surrogates. Such sugar surrogates may comprise one or more substitutions corresponding to those of other types of modified sugar moieties.

[0241] In certain embodiments, modified sugar moieties are non-bicyclic modified sugar moieties comprising a furanosyl ring with one or more substituent groups none of which bridges two atoms of the furanosyl ring to form a bicyclic structure. Such non bridging substituents may be at any position of the furanosyl, including but not limited to substituents at the 2′, 4′, and/or 5′ positions. In certain embodiments one or more non-bridging substituent of non-bicyclic modified sugar moieties is branched. Examples of 2′-substituent groups suitable for non-bicyclic modified sugar moieties include but are not limited to: 2′-F, 2′-OCH₃ (“OMe” or “O-methyl”), and 2′-O(CH₂)₂OCH₃ (“MOE”). In certain embodiments, 2′-substituent groups are selected from among: halo, allyl, amino, azido, SH, CN, OCN, CF₃, OCF₃, O—C₁-C₁₀ alkoxy, O—C₁-C₁₀ substituted alkoxy, O—C₁-C₁₀ alkyl, O—C₁-C₁₀ substituted alkyl, S-alkyl, N(Rₘ)-alkyl, O-alkenyl, S-alkenyl, N(Rₘ)-alkenyl, O-alkynyl, S-alkynyl, N(Rₘ)-alkynyl, O-alkylenyl-O-alkyl, alkynyl, alkaryl, aralkyl, O-alkaryl, O-aralkyl, O(CH₂)₂SCH₃, O(CH₂)₂ON(Rₘ)(Rₙ) or OCH₂C(═O)—N(Rₘ)(Rₙ), where each Rₘ and Rₙ is, independently, H, an amino protecting group, or substituted or unsubstituted C₁-C₁₀ alkyl, and the 2′-substituent groups described in Cook et al., U.S. Pat. No. 6,531,584; Cook et al., U.S. Pat. No. 5,859,221; and Cook et al., U.S. Pat. No. 6,005,087. Certain embodiments of these 2′-substituent groups can be further substituted with one or more substituent groups independently selected from among: hydroxyl, amino, alkoxy, carboxy, benzyl, phenyl, nitro (NO₂), thiol, thioalkoxy, thioalkyl, halogen, alkyl, aryl, alkenyl and alkynyl. Examples of 4′-substituent groups suitable for non-bicyclic modified sugar moieties include but are not limited to alkoxy (e.g., methoxy), alkyl, and those described in Manoharan et al., WO 2015/106128. Examples of 5′-substituent groups suitable for non-bicyclic modified sugar moieties include but are not limited to: 5-methyl (R or S), 5′-vinyl, and 5′-methoxy. In certain embodiments, non-bicyclic modified sugar moieties comprise more than one non-bridging sugar substituent, for example, 2′-F-5′-methyl sugar moieties and the modified sugar moieties and modified nucleosides described in Migawa et al., WO 2008/101157 and Rajeev et al., US2013/0203836.

[0242] In certain embodiments, a 2′-substituted non-bicyclic modified nucleoside comprises a sugar moiety comprising a non-bridging 2′-substituent group selected from: F, NH₂, N₃, OCF₃, OCH₃, O(CH₂)₃NH₂, CH₂CH═CH₂, OCH₂CH═CH₂, OCH₂CH₂OCH₃, O(CH₂)₂SCH₃, O(CH₂)₂ON(Rₘ)(Rₙ), O(CH₂)₂O(CH₂)₂N(CH₃)₂, and N-substituted acetamide (OCH₂C(═O)—N(Rₘ)(Rₙ)), where each Rₘ and Rₙ is, independently, H, an amino protecting group, or substituted or unsubstituted C₁-C₁₀ alkyl.

[0243] In certain embodiments, a 2′-substituted nucleoside non-bicyclic modified nucleoside comprises a sugar moiety comprising a non-bridging 2′-substituent group selected from: F, OCF₃, OCH₃, OCH₂CH₂OCH₃, O(CH₂)₂SCH₃, O(CH₂)₂ON(CH₃)₂, O(CH₂)₂O(CH₂)₂N(CH₃)₂, and OCH₂C(═O)—N(H)CH₃ (“NMA”).

[0244] In certain embodiments, a 2′-substituted non-bicyclic modified nucleoside comprises a sugar moiety comprising a non-bridging 2′-substituent group selected from: F, OCH₃, and OCH₂CH₂OCH₃.

[0245] Certain modified sugar moieties comprise a substituent that bridges two atoms of the furanosyl ring to form a second ring, resulting in a bicyclic sugar moiety. In certain such embodiments, the bicyclic sugar moiety comprises a bridge between the 4′ and the 2′ furanose ring atoms. Examples of such 4′ to 2′ bridging sugar substituents include but are not limited to: 4′-CH₂-2′, 4′-(CH₂)₂-2′, 4′-(CH₂)₃-2′, 4′-CH₂—O-2′ (“LNA”), 4′-CH₂—S-2′, 4′-(CH₂)₂-O-2′ (“ENA”), 4′-CH(CH₃)—O-2′ (referred to as “constrained ethyl” or “cEt”), 4′-CH₂—O—CH₂-2′, 4′- CH₂—N(R)-2′, 4′-CH(CH₂OCH₃)—O-2′ (“constrained MOE” or “cMOE”) and analogs thereof (see, e.g., Seth et al., U.S. Pat. No. 7,399,845, Bhat et al., U.S. Pat. No. 7,569,686, Swayze et al., U.S. Pat. No. 7,741,457, and Swayze et al., U.S. Pat. No. 8,022,193), 4′-C(CH₃)(CH₃)—O-2′ and analogs thereof (see, e.g., Seth et al., U.S. Pat. No. 8,278,283), 4′-CH₂—N(OCH₃)-2′ and analogs thereof (see, e.g., Prakash et al., U.S. Pat. No. 8,278,425), 4′-CH₂—O—N(CH₃)-2′ (see, e.g., Allerson et al., U.S. Pat. No. 7,696,345 and Allerson et al., U.S. Pat. No. 8,124,745), 4′-CH₂—C(H)(CH₃)-2′ (see, e.g., Zhou, et al., J. Org. Chem.,2009, 74, 118-134), 4′-CH₂—C(═CH₂)-2′ and analogs thereof (see e.g., Seth et al., U.S. Pat. No. 8,278,426), 4′-C(RₐR_{b})—N(R)—O-2′, 4′-C(RₐR_{b})—O—N(R)-2′, 4′-CH₂—O—N(R)-2′, and 4′-CH₂—N(R)—O-2′, wherein each R, Rₐ, and R_{b} is, independently, H, a protecting group, or C₁-C₁₂ alkyl (see, e.g. Imanishi et al., U.S. Pat. No. 7,427,672).

[0246] In certain embodiments, such 4′ to 2′ bridges independently comprise from 1 to 4 linked groups independently selected from: —[C(Rₐ)(R_{b})]ₙ—, —[C(Rₐ)(R_{b})]ₙ—O—, —C(Rₐ)═C(R_{b})—, —C(Rₐ)═N—, —C(═NRₐ)—, —C(═O)—, —C(═S)—, —O—, —Si(Rₐ)₂—, —S(═O)ₓ—, and —N(Rₐ)—; wherein:
[0247] x is 0, 1, or 2;
[0248] n is 1, 2, 3, or 4;
[0249] each Rₐ and R_{b} is, independently, H, a protecting group, hydroxyl, C₁-C₁₂ alkyl, substituted C₁-C₁₂ alkyl, C₂-C₁₂ alkenyl, substituted C₂-C₁₂ alkenyl, C₂-C₁₂ alkynyl, substituted C₂-C₁₂ alkynyl, C₅-C₂₀ aryl, substituted C₅-C₂₀ aryl, heterocycle radical, substituted heterocycle radical, heteroaryl, substituted heteroaryl, C₅-C₇ alicyclic radical, substituted C₅-C₇ alicyclic radical, halogen, OJ₁, NJ₁J₂, SJ₁, N₃, COOJ₁, acyl (C(═O)—H), substituted acyl, CN, sulfonyl (S(═O)₂-J₁), or sulfoxyl (S(═O)-J₁); and
[0250] each J₁ and J₂ is, independently, H, C₁-C₁₂ alkyl, substituted C₁-C₁₂ alkyl, C₂-C₁₂ alkenyl, substituted C₂-C₁₂ alkenyl, C₂-C₁₂ alkynyl, substituted C₂-C₁₂ alkynyl, C₅-C₂₀ aryl, substituted C₅-C₂₀ aryl, acyl (C(═O)—H), substituted acyl, a heterocycle radical, a substituted heterocycle radical, C₁-C₁₂ aminoalkyl, substituted C₁-C₁₂ aminoalkyl, or a protecting group.

[0251] Additional bicyclic sugar moieties are known in the art, see, for example: Freier et al., Nucleic Acids Research, 1997, 25(22), 4429-4443, Albaek et al., J. Org. Chem., 2006, 71, 7731-7740, Singh et al., Chem. Commun., 1998, 4, 455-456; Koshkin et al., Tetrahedron, 1998, 54, 3607-3630; Kumar et al., Bioorg. Med. Chem. Lett., 1998, 8, 2219-2222; Singh et al., J. Org. Chem., 1998, 63, 10035-10039; Srivastava et al., J. Am. Chem. Soc., 2007, 129, 8362-8379; Wengel et a., U.S. Pat. No. 7,053,207; Imanishi et al., U.S. Pat. No. 6,268,490; Imanishi et al. U.S. Pat. No. 6,770,748; Imanishi et al., U.S. RE44,779; Wengel et al., U.S. Pat. No. 6,794,499; Wengel et al., U.S. Pat. No. 6,670,461; Wengel et al., U.S. Pat. No. 7,034,133; Wengel et al., U.S. Pat. No. 8,080,644; Wengel et al., U.S. Pat. No. 8,034,909; Wengel et al., U.S. Pat. No. 8,153,365; Wengel et al., U.S. Pat. No. 7,572,582; Ramasamy et al., U.S. Pat. No. 6,525,191; Torsten et al., WO 2004/106356; Wengel et al., WO 1999/014226; Seth et al., WO 2007/134181; Seth et al., U.S. Pat. No. 7,547,684; Seth et al., U.S. Pat. No. 7,666,854; Seth et al., U.S. Pat. No. 8,088,746; Seth et al., U.S. Pat. No. 7,750,131; Seth et al., U.S. Pat. No. 8,030,467; Seth et al., U.S. Pat. No. 8,268,980; Seth et al., U.S. Pat. No. 8,546,556; Seth et al., U.S. Pat. No. 8,530,640; Migawa et al., U.S. Pat. No. 9,012,421; Seth et al., U.S. Pat. No. 8,501,805; and U.S. Patent Publication Nos. Allerson et al., US2008/0039618 and Migawa et al., US2015/0191727.

[0252] In certain embodiments, bicyclic sugar moieties and nucleosides incorporating such bicyclic sugar moieties are further defined by isomeric configuration. For example, an LNA nucleoside (described herein) may be in the a-L configuration or in the p-D configuration.

[chemical structure]

α-L-methyleneoxy (4′-CH₂—O-2′) or α-L-LNA bicyclic nucleosides have been incorporated into oligonucleotides that showed antisense activity (Frieden et al., Nucleic Acids Research, 2003, 21, 6365-6372). Herein, general descriptions of bicyclic nucleosides include both isomeric configurations. When the positions of specific bicyclic nucleosides (e.g., LNA or cEt) are identified in exemplified embodiments herein, they are in the β-D configuration, unless otherwise specified.

[0253] In certain embodiments, modified sugar moieties comprise one or more non-bridging sugar substituent and one or more bridging sugar substituent (e.g., 5′-substituted and 4′-2′ bridged sugars).

[0254] In certain embodiments, modified sugar moieties are sugar surrogates. In certain such embodiments, the oxygen atom of the sugar moiety is replaced, e.g., with a sulfur, carbon or nitrogen atom. In certain such embodiments, such modified sugar moieties also comprise bridging and/or non-bridging substituents as described herein. For example, certain sugar surrogates comprise a 4′-sulfur atom and a substitution at the 2-position (see, e.g., Bhat et al., U.S. Pat. No. 7,875,733 and Bhat et al., U.S. Pat. No. 7,939,677) and/or the 5′ position.

[0255] In certain embodiments, sugar surrogates comprise rings having other than 5 atoms. For example, in certain embodiments, a sugar surrogate comprises a six-membered tetrahydropyran (“THP”). Such tetrahydropyrans may be further modified or substituted. Nucleosides comprising such modified tetrahydropyrans include but are not limited to hexitol nucleic acid (“HNA”), anitol nucleic acid (“ANA”), manitol nucleic acid (“MNA”) (see, e.g., Leumann, CJ. Bioorg. & Med. Chem. 2002, 10, 841-854), fluoro HNA:

[chemical structure]

(“F-HNA”, see e.g. Swayze et al., U.S. Pat. No. 8,088,904; Swayze et al., U.S. Pat. No. 8,440,803; Swayze et al., U.S. Pat. No. 8,796,437; and Swayze et al., U.S. Pat. No. 9,005,906; F-HNA can also be referred to as a F-THP or 3-fluoro tetrahydropyran), and nucleosides comprising additional modified THP compounds having the formula:

[chemical structure]

wherein, independently, for each of said modified THP nucleoside:
[0256] Bx is a nucleobase moiety;
[0257] T₃ and T₄ are each, independently, an internucleoside linking group linking the modified THP nucleoside to the remainder of an oligonucleotide or one of T₃ and T₄ is an internucleoside linking group linking the modified THP nucleoside to the remainder of an oligonucleotide and the other of T₃ and T₄ is H, a hydroxyl protecting group, a linked conjugate group, or a 5′ or 3′-terminal group;
   q₁, q₂, q₃, q₄, q₅, q₆ and q₇ are each, independently, H, C₁-C₆ alkyl, substituted C₁-C₆ alkyl, C₂-C₆ alkenyl, substituted C₂-C₆ alkenyl, C₂-C₆ alkynyl, or substituted C₂-C₆ alkynyl; and
[0258] each of R₁ and R₂ is independently selected from among: hydrogen, halogen, substituted or unsubstituted alkoxy, NJ₁J₂, SJ₁, N₃, OC(═X)J₁, OC(═X)NJ₁J₂, NJ₃C(═X)NJ₁J₂, and CN, wherein X is O, S or NJ₁, and each J₁, J₂, and J₃ is, independently, H or C₁-C₆ alkyl.

[0259] In certain embodiments, modified THP nucleosides are provided wherein q₁, q₂, q₃, q₄, q₅, q₆ and q₇ are each H. In certain embodiments, at least one of q₁, q₂, q₃, q₄, q₅, q₆ and q₇ is other than H. In certain embodiments, at least one of q₁, q₂, q₃, q₄, q₅, q₆ and q₇ is methyl. In certain embodiments, modified THP nucleosides are provided wherein one of R₁ and R₂ is F. In certain embodiments, R₁ is F and R₂ is H, in certain embodiments, R₁ is methoxy and R₂ is H, and in certain embodiments, R₁ is methoxyethoxy and R₂ is H.

[0260] In certain embodiments, sugar surrogates comprise rings having more than 5 atoms and more than one heteroatom. For example, nucleosides comprising morpholino sugar moieties and their use in oligonucleotides have been reported (see, e.g., Braasch et al., Biochemistry, 2002, 41, 4503-4510 and Summerton et al., U.S. Pat. No. 5,698,685; Summerton et al., U.S. Pat. No. 5,166,315; Summerton et al., U.S. Pat. No. 5,185,444; and Summerton et al., U.S. Pat. No. 5,034,506). As used here, the term “morpholino” means a sugar surrogate having the following structure:

[chemical structure]

In certain embodiments, morpholinos may be modified, for example by adding or altering various substituent groups from the above morpholino structure. Such sugar surrogates are referred to herein as “modified morpholinos.”

[0261] In certain embodiments, sugar surrogates comprise acyclic moieties. Examples of nucleosides and oligonucleotides comprising such acyclic sugar surrogates include but are not limited to: peptide nucleic acid (“PNA”), acyclic butyl nucleic acid (see, e.g., Kumar et al., Org. Biomol. Chem., 2013, 11, 5853-5865), and nucleosides and oligonucleotides described in Manoharan et al., WO2011/133876.

[0262] Many other bicyclic and tricyclic sugar and sugar surrogate ring systems are known in the art that can be used in modified nucleosides.

### 2. Certain Modified Nucleobases

[0263] In certain embodiments, modified oligonucleotides comprise one or more nucleosides comprising an unmodified nucleobase. In certain embodiments, modified oligonucleotides comprise one or more nucleosides comprising a modified nucleobase. In certain embodiments, modified oligonucleotides comprise one or more nucleosides that does not comprise a nucleobase, referred to as an abasic nucleoside.

[0264] In certain embodiments, modified nucleobases are selected from: 5-substituted pyrimidines, 6-azapyrimidines, alkyl or alkynyl substituted pyrimidines, alkyl substituted purines, and N-2, N-6 and 0-6 substituted purines.

[0265] In certain embodiments, modified nucleobases are selected from: 2-aminopropyladenine, 5-hydroxymethyl cytosine, xanthine, hypoxanthine, 2-aminoadenine, 6-N-methylguanine, 6-N-methyladenine, 2-propyladenine, 2-thiouracil, 2-thiothymine and 2-thiocytosine, 5-propynyl (—C≡C—CH₃) uracil, 5-propynylcytosine, 6-azouracil, 6-azocytosine, 6-azothymine, 5-ribosyluracil (pseudouracil), 4-thiouracil, 8-halo, 8-amino, 8-thiol, 8-thioalkyl, 8-hydroxyl, 8-aza and other 8-substituted purines, 5-halo, particularly 5-bromo, 5-trifluoromethyl, 5-halouracil, and 5-halocytosine, 7-methylguanine, 7-methyladenine, 2-F-adenine, 2-aminoadenine, 7-deazaguanine, 7-deazaadenine, 3-deazaguanine, 3-deazaadenine, 6-N-benzoyladenine, 2-N-isobutyrylguanine, 4-N-benzoylcytosine, 4-N-benzoyluracil, 5-methyl 4-N-benzoylcytosine, 5-methyl 4-N-benzoyluracil, universal bases, hydrophobic bases, promiscuous bases, size-expanded bases, and fluorinated bases. Further modified nucleobases include tricyclic pyrimidines, such as 1,3-diazaphenoxazine-2-one, 1,3-diazaphenothiazine-2-one and 9-(2-aminoethoxy)-1,3-diazaphenoxazine-2-one (G-clamp). Modified nucleobases may also include those in which the purine or pyrimidine base is replaced with other heterocycles, for example 7-deaza-adenine, 7-deazaguanosine, 2-aminopyridine and 2-pyridone. Further nucleobases include those disclosed in Merigan et al., U.S. Pat. No. 3,687,808, those disclosed in The Concise Encyclopedia Of Polymer Science And Engineering, Kroschwitz, J. I., Ed., John Wiley & Sons, 1990, 858-859; Englisch et al., Angewandte Chemie, International Edition, 1991, 30, 613; Sanghvi, Y. S., Chapter 15, Antisense Research and Applications, Crooke, S. T. and Lebleu, B., Eds., CRC Press, 1993, 273-288; and those disclosed in Chapters 6 and 15, Antisense Drug Technology, Crooke S. T., Ed., CRC Press, 2008, 163-166 and 442-443.

[0266] Publications that teach the preparation of certain of the above noted modified nucleobases as well as other modified nucleobases include without limitation, Manoharan et al., US2003/0158403; Manoharan et al., US2003/0175906; Dinh et al., U.S. Pat. No. 4,845,205; Spielvogel et al., U.S. Pat. No. 5,130,302; Rogers et al., U.S. Pat. No. 5,134,066; Bischofberger et al., U.S. Pat. No. 5,175,273; Urdea et al., U.S. Pat. No. 5,367,066; Benner et al., U.S. Pat. No. 5,432,272; Matteucci et al., U.S. Pat. No. 5,434,257; Gmeiner et al., U.S. Pat. No. 5,457,187; Cook et al., U.S. Pat. No. 5,459,255; Froehler et al., U.S. Pat. No. 5,484,908; Matteucci et al., U.S. Pat. No. 5,502,177; Hawkins et al., U.S. Pat. No. 5,525,711; Haralambidis et al., U.S. Pat. No. 5,552,540; Cook et al., U.S. Pat. No. 5,587,469; Froehler et al., U.S. Pat. No. 5,594,121; Switzer et al., U.S. Pat. No. 5,596,091; Cook et al., U.S. Pat. No. 5,614,617; Froehler et al., U.S. Pat. No. 5,645,985; Cook et al., U.S. Pat. No. 5,681,941; Cook et al., U.S. Pat. No. 5,811,534; Cook et al., U.S. Pat. No. 5,750,692; Cook et al., U.S. Pat. No. 5,948,903; Cook et al., U.S. Pat. No. 5,587,470; Cook et al., U.S. Pat. No. 5,457,191; Matteucci et al., U.S. Pat. No. 5,763,588; Froehler et al., U.S. Pat. No. 5,830,653; Cook et al., U.S. Pat. No. 5,808,027; Cook et al., 6,166,199; and Matteucci et al., U.S. Pat. No. 6,005,096.

### 3. Certain Modified Internucleoside Linkages

[0267] In certain embodiments, nucleosides of modified oligonucleotides may be linked together using any internucleoside linkage. The two main classes of internucleoside linking groups are defined by the presence or absence of a phosphorus atom. Representative phosphorus-containing internucleoside linkages include but are not limited to phosphodiesters, which contain a phosphodiester bond (“P(O₂)═O”) (also referred to as unmodified or naturally occurring linkages), phosphotriesters, methylphosphonates, phosphoramidates, and phosphorothioates (“P(O₂)═S”), and phosphorodithioates (“HS—P═S”). Representative non-phosphorus containing internucleoside linking groups include but are not limited to methylenemethylimino (—CH₂—N(CH₃)—O—CH₂—), thiodiester, thionocarbamate (—O—C(═O)(NH)—S—); siloxane (—O—SiH₂—O—); and N,N′-dimethylhydrazine (—CH₂—N(CH₃)—N(CH₃)—). Modified internucleoside linkages, compared to naturally occurring phosphate linkages, can be used to alter, typically increase, nuclease resistance of the oligonucleotide. In certain embodiments, internucleoside linkages having a chiral atom can be prepared as a racemic mixture, or as separate enantiomers. Methods of preparation of phosphorous-containing and non-phosphorous-containing internucleoside linkages are well known to those skilled in the art.

[0268] Representative internucleoside linkages having a chiral center include but are not limited to alkylphosphonates and phosphorothioates. Modified oligonucleotides comprising internucleoside linkages having a chiral center can be prepared as populations of modified oligonucleotides comprising stereorandom internucleoside linkages, or as populations of modified oligonucleotides comprising phosphorothioate linkages in particular stereochemical configurations. In certain embodiments, populations of modified oligonucleotides comprise phosphorothioate internucleoside linkages wherein all of the phosphorothioate internucleoside linkages are stereorandom. Such modified oligonucleotides can be generated using synthetic methods that result in random selection of the stereochemical configuration of each phosphorothioate linkage. Nonetheless, as is well understood by those of skill in the art, each individual phosphorothioate of each individual oligonucleotide molecule has a defined stereoconfiguration. In certain embodiments, populations of modified oligonucleotides are enriched for modified oligonucleotides comprising one or more particular phosphorothioate internucleoside linkages in a particular, independently selected stereochemical configuration. In certain embodiments, the particular configuration of the particular phosphorothioate linkage is present in at least 65% of the molecules in the population. In certain embodiments, the particular configuration of the particular phosphorothioate linkage is present in at least 70% of the molecules in the population. In certain embodiments, the particular configuration of the particular phosphorothioate linkage is present in at least 80% of the molecules in the population. In certain embodiments, the particular configuration of the particular phosphorothioate linkage is present in at least 90% of the molecules in the population. In certain embodiments, the particular configuration of the particular phosphorothioate linkage is present in at least 99% of the molecules in the population. Such chirally enriched populations of modified oligonucleotides can be generated using synthetic methods known in the art, e.g., methods described in Oka et al., JACS 125, 8307 (2003), Wan et al. Nuc. Acid. Res. 42, 13456 (2014), and WO 2017/015555. In certain embodiments, a population of modified oligonucleotides is enriched for modified oligonucleotides having at least one indicated phosphorothioate in the (Sp) configuration. In certain embodiments, a population of modified oligonucleotides is enriched for modified oligonucleotides having at least one phosphorothioate in the (Rp) configuration. In certain embodiments, modified oligonucleotides comprising (Rp) and/or (Sp) phosphorothioates comprise one or more of the following formulas, respectively, wherein “B” indicates a nucleobase:

[chemical structure]

Unless otherwise indicated, chiral internucleoside linkages of modified oligonucleotides described herein can be stereorandom or in a particular stereochemical configuration.

[0269] Neutral internucleoside linkages include, without limitation, phosphotriesters, methylphosphonates, MMI (3′-CH₂—N(CH₃)—O-5′), amide-3 (3′-CH₂—C(═O)—N(H)-5′), amide-4 (3′-CH₂—N(H)—C(═O)-5′), formacetal (3′- O—CH₂-0-5′), methoxypropyl (MOP), and thioformacetal (3′-S—CH₂—O—5′). Further neutral internucleoside linkages include nonionic linkages comprising siloxane (dialkylsiloxane), carboxylate ester, carboxamide, sulfide, sulfonate ester and amides (See for example: Carbohydrate Modifications in Antisense Research; Y. S. Sanghvi and P. D. Cook, Eds., ACS Symposium Series 580; Chapters 3 and 4, 40-65). Further neutral internucleoside linkages include nonionic linkages comprising mixed N, O, S and CH₂ component parts.

### B. Certain Motifs

[0270] In certain embodiments, modified oligonucleotides comprise one or more modified nucleosides comprising a modified sugar moiety. In certain embodiments, modified oligonucleotides comprise one or more modified nucleosides comprising a modified nucleobase. In certain embodiments, modified oligonucleotides comprise one or more modified internucleoside linkage. In such embodiments, the modified, unmodified, and differently modified sugar moieties, nucleobases, and/or internucleoside linkages of a modified oligonucleotide define a pattern or motif. In certain embodiments, the patterns of sugar moieties, nucleobases, and internucleoside linkages are each independent of one another. Thus, a modified oligonucleotide may be described by its sugar motif, nucleobase motif and/or internucleoside linkage motif (as used herein, nucleobase motif describes the modifications to the nucleobases independent of the sequence of nucleobases).

### 1. Certain Sugar Motifs

[0271] In certain embodiments, oligonucleotides comprise one or more type of modified sugar and/or unmodified sugar moiety arranged along the oligonucleotide or portion thereof in a defined pattern or sugar motif. In certain instances, such sugar motifs include but are not limited to any of the sugar modifications discussed herein.

[0272] In certain embodiments, modified oligonucleotides have a gapmer motif, which is defined by two external regions or “wings” and a central or internal region or “gap.” The three regions of a gapmer motif (the 5′-wing, the gap, and the 3′-wing) form a contiguous sequence of nucleosides wherein at least some of the sugar moieties of the nucleosides of each of the wings differ from at least some of the sugar moieties of the nucleosides of the gap. Specifically, at least the sugar moieties of the nucleosides of each wing that are closest to the gap (the 3′-most nucleoside of the 5′-wing and the 5′-most nucleoside of the 3′-wing) differ from the sugar moiety of the neighboring gap nucleosides, thus defining the boundary between the wings and the gap (i.e., the wing/gap junction). In certain embodiments, the sugar moieties within the gap are the same as one another. In certain embodiments, the gap includes one or more nucleoside having a sugar moiety that differs from the sugar moiety of one or more other nucleosides of the gap. In certain embodiments, the sugar motifs of the two wings are the same as one another (symmetric gapmer). In certain embodiments, the sugar motif of the 5′-wing differs from the sugar motif of the 3′-wing (asymmetric gapmer).

[0273] In certain embodiments, the wings of a gapmer comprise 1-6 nucleosides. In certain embodiments, each nucleoside of each wing of a gapmer comprises a modified sugar moiety. In certain embodiments, at least one nucleoside of each wing of a gapmer comprises a modified sugar moiety. In certain embodiments, at least two nucleosides of each wing of a gapmer comprises a modified sugar moiety. In certain embodiments, at least three nucleosides of each wing of a gapmer comprises a modified sugar moiety. In certain embodiments, at least four nucleosides of each wing of a gapmer comprises a modified sugar moiety. In certain embodiments, at least five nucleosides of each wing of a gapmer comprises a modified sugar moiety.

[0274] In certain embodiments, the gap of a gapmer comprises 7-12 nucleosides. In certain embodiments, each nucleoside of the gap of a gapmer comprises a 2′-β-D-deoxyribosyl sugar moiety. In certain embodiments, at least one nucleoside of the gap of a gapmer comprises a modified sugar moiety.

[0275] In certain embodiments, the gapmer is a deoxy gapmer. In certain embodiments, the nucleosides on the gap side of each wing/gap junction comprise 2′-deoxyribosyl sugar moieties and the nucleosides on the wing sides of each wing/gap junction comprise modified sugar moieties. In certain embodiments, each nucleoside of the gap comprises a 2′-β-D-deoxyribosyl sugar moiety. In certain embodiments, each nucleoside of each wing of a gapmer comprises a modified sugar moiety. In certain embodiments, exactly one nucleoside of the gap comprises a modified sugar moiety and each remaining nucleoside of the gap comprises a 2′-β-D-deoxyribosyl sugar moiety.

[0276] In certain embodiments, modified oligonucleotides comprise or consist of a portion having a fully modified sugar motif. In such embodiments, each nucleoside of the fully modified portion of the modified oligonucleotide comprises a modified sugar moiety. In certain embodiments, each nucleoside of the entire modified oligonucleotide comprises a modified sugar moiety. In certain embodiments, modified oligonucleotides comprise or consist of a portion having a fully modified sugar motif, wherein each nucleoside within the fully modified portion comprises the same modified sugar moiety, referred to herein as a uniformly modified sugar motif. In certain embodiments, a fully modified oligonucleotide is a uniformly modified oligonucleotide. In certain embodiments, each nucleoside of a uniformly modified comprises the same 2′-modification.

[0277] Herein, the lengths (number of nucleosides) of the three regions of a gapmer may be provided using the notation [# of nucleosides in the 5′-wing]-[# of nucleosides in the gap]-[# of nucleosides in the 3′-wing]. Thus, a 3-10-3 gapmer consists of 3 linked nucleosides in each wing and 10 linked nucleosides in the gap. Where such nomenclature is followed by a specific modification, that modification is the modification in each sugar moiety of each wing and the gap nucleosides comprise 2′-β-D-deoxyribosyl sugar moieties. Thus, a 5-10-5 MOE gapmer consists of 5 linked 2′-MOE nucleosides in the 5′-wing, 10 linked 2′-β-D-deoxynucleosides in the gap, and 5 linked 2′-MOE nucleosides in the 3′-wing. A 3-10-3 cEt gapmer consists of 3 linked cEt nucleosides in the 5′-wing, 10 linked 2′-β-D-deoxynucleosides in the gap, and 3 linked cEt nucleosides in the 3′-wing. A 5-8-5 gapmer consists of 5 linked nucleosides comprising a modified sugar moiety in the 5′-wing, 8 linked 2′-β-D-deoxynucleosides in the gap, and 5 linked nucleosides comprising a modified sugar moiety in the 3′-wing. A 5-8-5 mixed gapmer has at least two different modified sugar moieties in the 5′- and/or the 3′-wing.

[0278] In certain embodiments, modified oligonucleotides are 5-10-5 MOE gapmers. In certain embodiments, modified oligonucleotides are 4-10-6 MOE gapmers. In certain embodiments, modified oligonucleotides are 6-10-4 MOE gapmers. In certain embodiments, modified oligonucleotides are 5-8-5 MOE gapmers. In certain embodiments, modified oligonucleotides are 6-8-4 MOE gapmers. In certain embodiments, modified oligonucleotides are 4-8-6 MOE gapmers. In certain embodiments, modified oligonucleotides are X—Y—Z MOE gapmers, wherein X and Z are independently selected from 1, 2, 3, 4, 5, or 6 and Y is 7, 8, 9, 10, or 11.

### 2. Certain Nucleobase Motifs

[0279] In certain embodiments, oligonucleotides comprise modified and/or unmodified nucleobases arranged along the oligonucleotide or portion thereof in a defined pattern or motif. In certain embodiments, each nucleobase is modified. In certain embodiments, none of the nucleobases are modified. In certain embodiments, each purine or each pyrimidine is modified. In certain embodiments, each adenine is modified. In certain embodiments, each guanine is modified. In certain embodiments, each thymine is modified. In certain embodiments, each uracil is modified. In certain embodiments, each cytosine is modified. In certain embodiments, some or all of the cytosine nucleobases in a modified oligonucleotide are 5-methyl cytosines. In certain embodiments, all of the cytosine nucleobases are 5-methyl cytosines and all of the other nucleobases of the modified oligonucleotide are unmodified nucleobases.

[0280] In certain embodiments, modified oligonucleotides comprise a block of modified nucleobases. In certain such embodiments, the block is at the 3′-end of the oligonucleotide. In certain embodiments the block is within 3 nucleosides of the 3′-end of the oligonucleotide. In certain embodiments, the block is at the 5′-end of the oligonucleotide. In certain embodiments the block is within 3 nucleosides of the 5′-end of the oligonucleotide.

[0281] In certain embodiments, oligonucleotides having a gapmer motif comprise a nucleoside comprising a modified nucleobase. In certain such embodiments, one nucleoside comprising a modified nucleobase is in the central gap of an oligonucleotide having a gapmer motif. In certain such embodiments, the sugar moiety of said nucleoside is a 2′-β-D-deoxyribosyl sugar moiety. In certain embodiments, the modified nucleobase is selected from: a 2-thiopyrimidine and a 5-propynepyrimidine.

### 3. Certain Internucleoside Linkage Motifs

[0282] In certain embodiments, oligonucleotides comprise modified and/or unmodified internucleoside linkages arranged along the oligonucleotide or portion thereof in a defined pattern or motif. In certain embodiments, each internucleoside linking group is a phosphodiester internucleoside linkage (P(O₂)═O). In certain embodiments, each internucleoside linking group of a modified oligonucleotide is a phosphorothioate internucleoside linkage (P(O₂)═S). In certain embodiments, each internucleoside linkage of a modified oligonucleotide is independently selected from a phosphorothioate internucleoside linkage and phosphodiester internucleoside linkage. In certain embodiments, each phosphorothioate internucleoside linkage is independently selected from a stereorandom phosphorothioate, a (Sp) phosphorothioate, and a (Rp) phosphorothioate. In certain embodiments, the sugar motif of a modified oligonucleotide is a gapmer and the internucleoside linkages within the gap are all modified. In certain such embodiments, some or all of the internucleoside linkages in the wings are unmodified phosphodiester internucleoside linkages. In certain embodiments, the terminal internucleoside linkages are modified. In certain embodiments, the sugar motif of a modified oligonucleotide is a gapmer, and the internucleoside linkage motif comprises at least one phosphodiester internucleoside linkage in at least one wing, wherein the at least one phosphodiester linkage is not a terminal internucleoside linkage, and the remaining internucleoside linkages are phosphorothioate internucleoside linkages. In certain such embodiments, all of the phosphorothioate linkages are stereorandom. In certain embodiments, all of the phosphorothioate linkages in the wings are (Sp) phosphorothioates, and the gap comprises at least one Sp, Sp, Rp motif. In certain embodiments, populations of modified oligonucleotides are enriched for modified oligonucleotides comprising such internucleoside linkage motifs.

[0283] In certain embodiments, modified nucleotides have an internucleoside linkage motif of soooossssssssssooss, wherein each “s” represents a phosphorothioate internucleoside linkage and each “o” represents a phosphodiester internucleoside linkage. In certain embodiments, modified nucleotides have an internucleoside linkage motif of sooooossssssssssoss, wherein each “s” represents a phosphorothioate internucleoside linkage and each “o” represents a phosphodiester internucleoside linkage. In certain embodiments, modified nucleotides have an internucleoside linkage motif of soooosssssssssoss, wherein each “s” represents a phosphorothioate internucleoside linkage and each “o” represents a phosphodiester internucleoside linkage. In certain embodiments, modified nucleotides have an internucleoside linkage motif of sooosssssssssooss, wherein each “s” represents a phosphorothioate internucleoside linkage and each “o” represents a phosphodiester internucleoside linkage. In certain embodiments, modified nucleotides have an internucleoside linkage motif of sooossssssssssoooss, wherein each “s” represents a phosphorothioate internucleoside linkage and each “o” represents a phosphodiester internucleoside linkage. In certain embodiments, modified nucleotides have an internucleoside linkage motif of soosssssssssoooss, wherein each “s” represents a phosphorothioate internucleoside linkage and each “o” represents a phosphodiester internucleoside linkage.

### C. Certain Lengths

[0284] It is possible to increase or decrease the length of an oligonucleotide without eliminating activity. For example, in Woolf et al. (Proc. Natl. Acad. Sci. USA 89:7305-7309, 1992), a series of oligonucleotides 13-25 nucleobases in length were tested for their ability to induce cleavage of a target RNA in an oocyte injection model. Oligonucleotides 25 nucleobases in length with 8 or 11 mismatch bases near the ends of the oligonucleotides were able to direct specific cleavage of the target RNA, albeit to a lesser extent than the oligonucleotides that contained no mismatches. Similarly, target specific cleavage was achieved using 13 nucleobase oligonucleotides, including those with 1 or 3 mismatches.

[0285] In certain embodiments, oligonucleotides (including modified oligonucleotides) can have any of a variety of ranges of lengths. In certain embodiments, oligonucleotides consist of X to Y linked nucleosides, where X represents the fewest number of nucleosides in the range and Y represents the largest number nucleosides in the range. In certain such embodiments, X and Y are each independently selected from 8, 9, 10, 11, 12, 13, 14, 15, 16, 17, 18, 19, 20, 21, 22, 23, 24, 25, 26, 27, 28, 29, 30, 31, 32, 33, 34, 35, 36, 37, 38, 39, 40, 41, 42, 43, 44, 45, 46, 47, 48, 49, and 50; provided that X≤Y. For example, in certain embodiments, oligonucleotides consist of 12 to 13, 12 to 14, 12 to 15, 12 to 16, 12 to 17, 12 to 18, 12 to 19, 12 to 20, 12 to 21, 12 to 22, 12 to 23, 12 to 24, 12 to 25, 12 to 26, 12 to 27, 12 to 28, 12 to 29, 12 to 30, 13 to 14, 13 to 15, 13 to 16, 13 to 17, 13 to 18, 13 to 19, 13 to 20, 13 to 21, 13 to 22, 13 to 23, 13 to 24, 13 to 25, 13 to 26, 13 to 27, 13 to 28, 13 to 29, 13 to 30, 14 to 15, 14 to 16, 14 to 17, 14 to 18, 14 to 19, 14 to 20, 14 to 21, 14 to 22, 14 to 23, 14 to 24, 14 to 25, 14 to 26, 14 to 27, 14 to 28, 14 to 29, 14 to 30, 15 to 16, 15 to 17, 15 to 18, 15 to 19, 15 to 20, 15 to 21, 15 to 22, 15 to 23, 15 to 24, 15 to 25, 15 to 26, 15 to 27, 15 to 28, 15 to 29, 15 to 30, 16 to 17, 16 to 18, 16 to 19, 16 to 20, 16 to 21, 16 to 22, 16 to 23, 16 to 24, 16 to 25, 16 to 26, 16 to 27, 16 to 28, 16 to 29, 16 to 30, 17 to 18, 17 to 19, 17 to 20, 17 to 21, 17 to 22, 17 to 23, 17 to 24, 17 to 25, 17 to 26, 17 to 27, 17 to 28, 17 to 29, 17 to 30, 18 to 19, 18 to 20, 18 to 21, 18 to 22, 18 to 23, 18 to 24, 18 to 25, 18 to 26, 18 to 27, 18 to 28, 18 to 29, 18 to 30, 19 to 20, 19 to 21, 19 to 22, 19 to 23, 19 to 24, 19 to 25, 19 to 26, 19 to 29, 19 to 28, 19 to 29, 19 to 30, 20 to 21, 20 to 22, 20 to 23, 20 to 24, 20 to 25, 20 to 26, 20 to 27, 20 to 28, 20 to 29, 20 to 30, 21 to 22, 21 to 23, 21 to 24, 21 to 25, 21 to 26, 21 to 27, 21 to 28, 21 to 29, 21 to 30, 22 to 23, 22 to 24, 22 to 25, 22 to 26, 22 to 27, 22 to 28, 22 to 29, 22 to 30, 23 to 24, 23 to 25, 23 to 26, 23 to 27, 23 to 28, 23 to 29, 23 to 30, 24 to 25, 24 to 26, 24 to 27, 24 to 28, 24 to 29, 24 to 30, 25 to 26, 25 to 27, 25 to 28, 25 to 29, 25 to 30, 26 to 27, 26 to 28, 26 to 29, 26 to 30, 27 to 28, 27 to 29, 27 to 30, 28 to 29, 28 to 30, or 29 to 30 linked nucleosides.

### D. Certain Modified Oligonucleotides

[0286] In certain embodiments, the above modifications (sugar, nucleobase, internucleoside linkage) are incorporated into a modified oligonucleotide. In certain embodiments, modified oligonucleotides are characterized by their modification motifs and overall lengths. In certain embodiments, such parameters are each independent of one another. Thus, unless otherwise indicated, each internucleoside linkage of an oligonucleotide having a gapmer sugar motif may be modified or unmodified and may or may not follow the gapmer modification pattern of the sugar modifications. For example, the internucleoside linkages within the wing regions of a sugar gapmer may be the same or different from one another and may be the same or different from the internucleoside linkages of the gap region of the sugar motif. Likewise, such sugar gapmer oligonucleotides may comprise one or more modified nucleobase independent of the gapmer pattern of the sugar modifications. Unless otherwise indicated, all modifications are independent of nucleobase sequence.

### E. Certain Populations of Modified Oligonucleotides

[0287] Populations of modified oligonucleotides in which all of the modified oligonucleotides of the population have the same molecular formula can be stereorandom populations or chirally enriched populations. All of the chiral centers of all of the modified oligonucleotides are stereorandom in a stereorandom population. In a chirally enriched population, at least one particular chiral center is not stereorandom in the modified oligonucleotides of the population. In certain embodiments, the modified oligonucleotides of a chirally enriched population are enriched for β-D ribosyl sugar moieties, and all of the phosphorothioate internucleoside linkages are stereorandom. In certain embodiments, the modified oligonucleotides of a chirally enriched population are enriched for both β-D ribosyl sugar moieties and at least one, particular phosphorothioate internucleoside linkage in a particular stereochemical configuration.

### F. Nucleobase Sequence

[0288] In certain embodiments, oligonucleotides (unmodified or modified oligonucleotides) are further described by their nucleobase sequence. In certain embodiments oligonucleotides have a nucleobase sequence that is complementary to a second oligonucleotide or an identified reference nucleic acid, such as a target nucleic acid. In certain such embodiments, a portion of an oligonucleotide has a nucleobase sequence that is complementary to a second oligonucleotide or an identified reference nucleic acid, such as a target nucleic acid. In certain embodiments, the nucleobase sequence of a portion or entire length of an oligonucleotide is at least 50%, at least 60%, at least 70%, at least 80%, at least 85%, at least 90%, at least 95%, or 100% complementary to the second oligonucleotide or nucleic acid, such as a target nucleic acid.

### II. Certain Oligomeric Compounds

[0289] In certain embodiments, provided herein are oligomeric compounds, which consist of an oligonucleotide (modified or unmodified) and optionally one or more conjugate groups and/or terminal groups. Conjugate groups consist of one or more conjugate moiety and a conjugate linker which links the conjugate moiety to the oligonucleotide. Conjugate groups may be attached to either or both ends of an oligonucleotide and/or at any internal position. In certain embodiments, conjugate groups are attached to the 2′-position of a nucleoside of a modified oligonucleotide. In certain embodiments, conjugate groups that are attached to either or both ends of an oligonucleotide are terminal groups. In certain such embodiments, conjugate groups or terminal groups are attached at the 3′ and/or 5′-end of oligonucleotides. In certain such embodiments, conjugate groups (or terminal groups) are attached at the 3′-end of oligonucleotides. In certain embodiments, conjugate groups are attached near the 3′-end of oligonucleotides. In certain embodiments, conjugate groups (or terminal groups) are attached at the 5′-end of oligonucleotides. In certain embodiments, conjugate groups are attached near the 5′-end of oligonucleotides.

[0290] Examples of terminal groups include but are not limited to conjugate groups, capping groups, phosphate moieties, protecting groups, modified or unmodified nucleosides, and two or more nucleosides that are independently modified or unmodified.

### A. Certain Conjugate Groups

[0291] In certain embodiments, oligonucleotides are covalently attached to one or more conjugate groups. In certain embodiments, conjugate groups modify one or more properties of the attached oligonucleotide, including but not limited to pharmacodynamics, pharmacokinetics, stability, binding, absorption, tissue distribution, cellular distribution, cellular uptake, charge and clearance. In certain embodiments, conjugate groups impart a new property on the attached oligonucleotide, e.g., fluorophores or reporter groups that enable detection of the oligonucleotide. Certain conjugate groups and conjugate moieties have been described previously, for example: cholesterol moiety (Letsinger et al., Proc. Natl. Acad. Sci. USA, 1989, 86, 6553-6556), cholic acid (Manoharan et al., Bioorg. Med. Chem. Lett., 1994, 4, 1053-1060), a thioether, e.g., hexyl-S-tritylthiol (Manoharan et al., Ann. N.Y. Acad. Sci., 1992, 660, 306-309; Manoharan et al., Bioorg. Med. Chem. Lett., 1993, 3, 2765-2770), a thiocholesterol (Oberhauser et al., Nucl. Acids Res., 1992, 20, 533-538), an aliphatic chain, e.g., do-decan-diol or undecyl residues (Saison-Behmoaras et al., EMBO J, 1991, 10, 1111-1118; Kabanov et al., FEBS Lett., 1990, 259, 327-330; Svinarchuk et al., Biochimie, 1993, 75, 49-54), a phospholipid, e.g., di-hexadecyl-rac-glycerol or triethyl-ammonium 1,2-di-O-hexadecyl-rac-glycero-3-H-phosphonate (Manoharan et al., Tetrahedron Lett., 1995, 36, 3651-3654; Shea et al., Nucl. Acids Res., 1990, 18, 3777-3783), a polyamine or a polyethylene glycol chain (Manoharan et al., Nucleosides & Nucleotides, 1995, 14, 969-973), or adamantane acetic acid a palmityl moiety (Mishra et al., Biochim. Biophys. Acta, 1995, 1264, 229-237), an octadecylamine or hexylamino-carbonyl-oxycholesterol moiety (Crooke et al., J. Pharmacol. Exp. Ther., 1996, 277, 923-937), a tocopherol group (Nishina et al., Molecular Therapy Nucleic Acids, 2015, 4, e220; and Nishina et al., Molecular Therapy, 2008, 16, 734-740), or a GalNAc cluster (e.g., WO2014/179620).

[0292] In certain embodiments, conjugate groups may be selected from any of a C22 alkyl, C20 alkyl, C16 alkyl, C10 alkyl, C21 alkyl, C19 alkyl, C18 alkyl, C15 alkyl, C14 alkyl, C13 alkyl, C12 alkyl, C11 alkyl, C9 alkyl, C8 alkyl, C7 alkyl, C6 alkyl, C5 alkyl, C22 alkenyl, C20 alkenyl, C16 alkenyl, C10 alkenyl, C21 alkenyl, C19 alkenyl, C18 alkenyl, C15 alkenyl, C14 alkenyl, C13 alkenyl, C12 alkenyl, C1I alkenyl, C9 alkenyl, C8 alkenyl, C7 alkenyl, C6 alkenyl, or C5 alkenyl.

[0293] In certain embodiments, conjugate groups may be selected from any of C22 alkyl, C20 alkyl, C16 alkyl, C10 alkyl, C21 alkyl, C19 alkyl, C18 alkyl, C15 alkyl, C14 alkyl, C13 alkyl, C12 alkyl, C11 alkyl, C9 alkyl, C8 alkyl, C7 alkyl, C6 alkyl, and C5 alkyl, where the alkyl chain has one or more unsaturated bonds.

### 1. Conjugate Moieties

[0294] Conjugate moieties include, without limitation, intercalators, reporter molecules, polyamines, polyamides, peptides, carbohydrates, vitamin moieties, polyethylene glycols, thioethers, polyethers, cholesterols, thiocholesterols, cholic acid moieties, folate, lipids, phospholipids, biotin, phenazine, phenanthridine, anthraquinone, adamantane, acridine, fluoresceins, rhodamines, coumarins, fluorophores, and dyes.

[0295] In certain embodiments, a conjugate moiety comprises an active drug substance, for example, aspirin, warfarin, phenylbutazone, ibuprofen, suprofen, fen-bufen, ketoprofen, (S)-(+)-pranoprofen, carprofen, dansylsarcosine, 2,3,5-triiodobenzoic acid, fingolimod, flufenamic acid, folinic acid, a benzothiadiazide, chlorothiazide, a diazepine, indo-methicin, a barbiturate, a cephalosporin, a sulfa drug, an antidiabetic, an antibacterial or an antibiotic.

### 2. Conjugate Linkers

[0296] Conjugate moieties are attached to oligonucleotides through conjugate linkers. In certain oligomeric compounds, the conjugate linker is a single chemical bond (i.e., the conjugate moiety is attached directly to an oligonucleotide through a single bond). In certain embodiments, the conjugate linker comprises a chain structure, such as a hydrocarbyl chain, or an oligomer of repeating units such as ethylene glycol, nucleosides, or amino acid units.

[0297] In certain embodiments, a conjugate linker comprises one or more groups selected from alkyl, amino, oxo, amide, disulfide, polyethylene glycol, ether, thioether, and hydroxylamino. In certain such embodiments, the conjugate linker comprises groups selected from alkyl, amino, oxo, amide and ether groups. In certain embodiments, the conjugate linker comprises groups selected from alkyl and amide groups. In certain embodiments, the conjugate linker comprises groups selected from alkyl and ether groups. In certain embodiments, the conjugate linker comprises at least one phosphorus moiety. In certain embodiments, the conjugate linker comprises at least one phosphate group. In certain embodiments, the conjugate linker includes at least one neutral linking group.

[0298] In certain embodiments, conjugate linkers, including the conjugate linkers described above, are bifunctional linking moieties, e.g., those known in the art to be useful for attaching conjugate groups to parent compounds, such as the oligonucleotides provided herein. In general, a bifunctional linking moiety comprises at least two functional groups. One of the functional groups is selected to bind to a particular site on a parent compound and the other is selected to bind to a conjugate group. Examples of functional groups used in a bifunctional linking moiety include but are not limited to electrophiles for reacting with nucleophilic groups and nucleophiles for reacting with electrophilic groups. In certain embodiments, bifunctional linking moieties comprise one or more groups selected from amino, hydroxyl, carboxylic acid, thiol, alkyl, alkenyl, and alkynyl.

[0299] Examples of conjugate linkers include but are not limited to pyrrolidine, 8-amino-3,6-dioxaoctanoic acid (ADO), succinimidyl 4-(N-maleimidomethyl) cyclohexane-1-carboxylate (SMCC) and 6-aminohexanoic acid (AHEX or AHA). Other conjugate linkers include but are not limited to substituted or unsubstituted C₁-C₁₀ alkyl, substituted or unsubstituted C₂-C₁₀ alkenyl or substituted or unsubstituted C₂-C₁₀ alkynyl, wherein a nonlimiting list of preferred substituent groups includes hydroxyl, amino, alkoxy, carboxy, benzyl, phenyl, nitro, thiol, thioalkoxy, halogen, alkyl, aryl, alkenyl and alkynyl.

[0300] In certain embodiments, conjugate linkers comprise 1-10 linker-nucleosides. In certain embodiments, conjugate linkers comprise 2-5 linker-nucleosides. In certain embodiments, conjugate linkers comprise exactly 3 linker-nucleosides. In certain embodiments, conjugate linkers comprise the TCA motif. In certain embodiments, such linker-nucleosides are modified nucleosides. In certain embodiments such linker-nucleosides comprise a modified sugar moiety. In certain embodiments, linker-nucleosides are unmodified. In certain embodiments, linker-nucleosides comprise an optionally protected heterocyclic base selected from a purine, substituted purine, pyrimidine or substituted pyrimidine. In certain embodiments, a cleavable moiety is a nucleoside selected from uracil, thymine, cytosine, 4-N-benzoylcytosine, 5-methyl cytosine, 4-N-benzoyl-5-methyl cytosine, adenine, 6-N-benzoyladenine, guanine and 2-N-isobutyrylguanine. It is typically desirable for linker-nucleosides to be cleaved from the oligomeric compound after it reaches a target tissue. Accordingly, linker-nucleosides are typically linked to one another and to the remainder of the oligomeric compound through cleavable bonds. In certain embodiments, such cleavable bonds are phosphodiester bonds.

[0301] Herein, linker-nucleosides are not considered to be part of the oligonucleotide. Accordingly, in embodiments in which an oligomeric compound comprises an oligonucleotide consisting of a specified number or range of linked nucleosides and/or a specified percent complementarity to a reference nucleic acid and the oligomeric compound also comprises a conjugate group comprising a conjugate linker comprising linker-nucleosides, those linker-nucleosides are not counted toward the length of the oligonucleotide and are not used in determining the percent complementarity of the oligonucleotide for the reference nucleic acid. For example, an oligomeric compound may comprise (1) a modified oligonucleotide consisting of 8-30 nucleosides and (2) a conjugate group comprising 1-10 linker-nucleosides that are contiguous with the nucleosides of the modified oligonucleotide. The total number of contiguous linked nucleosides in such an oligomeric compound is more than 30. Alternatively, an oligomeric compound may comprise a modified oligonucleotide consisting of 8-30 nucleosides and no conjugate group. The total number of contiguous linked nucleosides in such an oligomeric compound is no more than 30. Unless otherwise indicated conjugate linkers comprise no more than 10 linker-nucleosides. In certain embodiments, conjugate linkers comprise no more than 5 linker-nucleosides. In certain embodiments, conjugate linkers comprise no more than 3 linker-nucleosides. In certain embodiments, conjugate linkers comprise no more than 2 linker-nucleosides. In certain embodiments, conjugate linkers comprise no more than 1 linker-nucleoside.

[0302] In certain embodiments, it is desirable for a conjugate group to be cleaved from the oligonucleotide. For example, in certain circumstances oligomeric compounds comprising a particular conjugate moiety are better taken up by a particular cell type, but once the oligomeric compound has been taken up, it is desirable that the conjugate group be cleaved to release the unconjugated or parent oligonucleotide. Thus, certain conjugate linkers may comprise one or more cleavable moieties. In certain embodiments, a cleavable moiety is a cleavable bond. In certain embodiments, a cleavable moiety is a group of atoms comprising at least one cleavable bond. In certain embodiments, a cleavable moiety comprises a group of atoms having one, two, three, four, or more than four cleavable bonds. In certain embodiments, a cleavable moiety is selectively cleaved inside a cell or subcellular compartment, such as a lysosome. In certain embodiments, a cleavable moiety is selectively cleaved by endogenous enzymes, such as nucleases.

[0303] In certain embodiments, a cleavable bond is selected from among: an amide, an ester, an ether, one or both esters of a phosphodiester, a phosphate ester, a carbamate, or a disulfide. In certain embodiments, a cleavable bond is one or both of the esters of a phosphodiester. In certain embodiments, a cleavable moiety comprises a phosphate or phosphodiester. In certain embodiments, the cleavable moiety is a phosphate or phosphodiester linkage between an oligonucleotide and a conjugate moiety or conjugate group.

[0304] In certain embodiments, a cleavable moiety comprises or consists of one or more linker-nucleosides. In certain such embodiments, the one or more linker-nucleosides are linked to one another and/or to the remainder of the oligomeric compound through cleavable bonds. In certain embodiments, such cleavable bonds are unmodified phosphodiester bonds. In certain embodiments, a cleavable moiety is 2′-deoxynucleoside that is attached to either the 3′ or 5′-terminal nucleoside of an oligonucleotide by a phosphodiester internucleoside linkage and covalently attached to the remainder of the conjugate linker or conjugate moiety by a phosphate or phosphorothioate linkage. In certain such embodiments, the cleavable moiety is 2′-deoxyadenosine.

### 3. Cell-Targeting Moieties

[0305] In certain embodiments, a conjugate group comprises a cell-targeting moiety. In certain embodiments, a conjugate group has the general formula:

[chemical structure]

[0306] wherein n is from 1 to about 3, m is 0 when n is 1, m is 1 when n is 2 or greater, j is 1 or 0, and k is 1 or 0.

[0307] In certain embodiments, n is 1, j is 1 and k is 0. In certain embodiments, n is 1, j is 0 and k is 1. In certain embodiments, n is 1, j is 1 and k is 1. In certain embodiments, n is 2, j is 1 and k is 0. In certain embodiments, n is 2, j is 0 and k is 1. In certain embodiments, n is 2, j is 1 and k is 1. In certain embodiments, n is 3, j is 1 and k is 0. In certain embodiments, n is 3, j is 0 and k is 1. In certain embodiments, n is 3, j is 1 and k is 1.

[0308] In certain embodiments, conjugate groups comprise cell-targeting moieties that have at least one tethered ligand. In certain embodiments, cell-targeting moieties comprise two tethered ligands covalently attached to a branching group. In certain embodiments, cell-targeting moieties comprise three tethered ligands covalently attached to a branching group.

### B. Certain Terminal Groups

[0309] In certain embodiments, oligomeric compounds comprise one or more terminal groups. In certain such embodiments, oligomeric compounds comprise a stabilized 5′-phosphate. Stabilized 5′-phosphates include, but are not limited to 5′-phosphanates, including, but not limited to 5′-vinylphosphonates. In certain embodiments, terminal groups comprise one or more abasic nucleosides and/or inverted nucleosides. In certain embodiments, terminal groups comprise one or more 2′-linked nucleosides. In certain such embodiments, the 2′-linked nucleoside is an abasic nucleoside.

### III. Oligomeric Duplexes

[0310] In certain embodiments, oligomeric compounds described herein comprise an oligonucleotide, having a nucleobase sequence complementary to that of a target nucleic acid. In certain embodiments, an oligomeric compound is paired with a second oligomeric compound to form an oligomeric duplex. Such oligomeric duplexes comprise a first oligomeric compound having a portion complementary to a target nucleic acid and a second oligomeric compound having a portion complementary to the first oligomeric compound. In certain embodiments, the first oligomeric compound of an oligomeric duplex comprises or consists of (1) a modified or unmodified oligonucleotide and optionally a conjugate group and (2) a second modified or unmodified oligonucleotide and optionally a conjugate group. Either or both oligomeric compounds of an oligomeric duplex may comprise a conjugate group. The oligonucleotides of each oligomeric compound of an oligomeric duplex may include non-complementary overhanging nucleosides.

### IV. Antisense Activity

[0311] In certain embodiments, oligomeric compounds and oligomeric duplexes are capable of hybridizing to a target nucleic acid, resulting in at least one antisense activity; such oligomeric compounds and oligomeric duplexes are antisense compounds. In certain embodiments, antisense compounds have antisense activity when they reduce or inhibit the amount or activity of a target nucleic acid by 25% or more in the standard cell assay. In certain embodiments, antisense compounds selectively affect one or more target nucleic acid. Such antisense compounds comprise a nucleobase sequence that hybridizes to one or more target nucleic acid, resulting in one or more desired antisense activity and does not hybridize to one or more non-target nucleic acid or does not hybridize to one or more non-target nucleic acid in such a way that results in significant undesired antisense activity.

[0312] In certain antisense activities, hybridization of an antisense compound to a target nucleic acid results in recruitment of a protein that cleaves the target nucleic acid. For example, certain antisense compounds result in RNase H mediated cleavage of the target nucleic acid. RNase H is a cellular endonuclease that cleaves the RNA strand of an RNA:DNA duplex. The DNA in such an RNA:DNA duplex need not be unmodified DNA. In certain embodiments, described herein are antisense compounds that are sufficiently “DNA-like” to elicit RNase H activity. In certain embodiments, one or more non-DNA-like nucleoside in the gap of a gapmer is tolerated.

[0313] In certain antisense activities, an antisense compound or a portion of an antisense compound is loaded into an RNA-induced silencing complex (RISC), ultimately resulting in cleavage of the target nucleic acid. For example, certain antisense compounds result in cleavage of the target nucleic acid by Argonaute. Antisense compounds that are loaded into RISC are RNAi compounds. RNAi compounds may be double-stranded (siRNA) or single-stranded (ssRNA).

[0314] In certain embodiments, hybridization of an antisense compound to a target nucleic acid does not result in recruitment of a protein that cleaves that target nucleic acid. In certain embodiments, hybridization of the antisense compound to the target nucleic acid results in alteration of splicing of the target nucleic acid. In certain embodiments, hybridization of an antisense compound to a target nucleic acid results in inhibition of a binding interaction between the target nucleic acid and a protein or other nucleic acid. In certain embodiments, hybridization of an antisense compound to a target nucleic acid results in alteration of translation of the target nucleic acid.

[0315] Antisense activities may be observed directly or indirectly. In certain embodiments, observation or detection of an antisense activity involves observation or detection of a change in an amount of a target nucleic acid or protein encoded by such target nucleic acid, a change in the ratio of splice variants of a nucleic acid or protein and/or a phenotypic change in a cell or subject.

### V. Certain Target Nucleic Acids

[0316] In certain embodiments, oligomeric compounds comprise or consist of an oligonucleotide comprising a portion that is complementary to a target nucleic acid. In certain embodiments, the target nucleic acid is an endogenous RNA molecule. In certain embodiments, the target nucleic acid encodes a protein. In certain such embodiments, the target nucleic acid is selected from: an endogenous antisense transcript that does not encode a protein (e.g., UBE3A-ATS), a mature mRNA, and a pre-mRNA, including intronic, exonic and untranslated regions. In certain embodiments, the target RNA is an antisense transcript. In certain embodiments, the target RNA is a mature mRNA. In certain embodiments, the target nucleic acid is a pre-mRNA. In certain such embodiments, the target region is entirely within an intron. In certain embodiments, the target region spans an intron/exon junction. In certain embodiments, the target region is at least 50% within an intron. In certain embodiments, the target nucleic acid is the RNA transcriptional product of a retrogene. In certain embodiments, the target nucleic acid is a non-coding RNA. In certain such embodiments, the target non-coding RNA is selected from: a long non-coding RNA, a short non-coding RNA, an intronic RNA molecule.

### A. Complementarity/Mismatches to the Target Nucleic Acid

[0317] It is possible to introduce mismatch bases without eliminating activity. For example, Gautschi et al (J. Natl. Cancer Inst. 93:463-471, March 2001) demonstrated the ability of an oligonucleotide having 100% complementarity to the bcl-2 mRNA and having 3 mismatches to the bcl-xL mRNA to reduce the expression of both bcl-2 and bcl-xL in vitro and in vivo. Furthermore, this oligonucleotide demonstrated potent anti-tumor activity in vivo. Maher and Dolnick (Nuc. Acid. Res. 16:3341-3358, 1988) tested a series of tandem 14 nucleobase oligonucleotides, and 28 and 42 nucleobase oligonucleotides comprised of the sequence of two or three of the tandem oligonucleotides, respectively, for their ability to arrest translation of human DHFR in a rabbit reticulocyte assay. Each of the three 14 nucleobase oligonucleotides alone was able to inhibit translation, albeit at a more modest level than the 28 or 42 nucleobase oligonucleotides.

[0318] In certain embodiments, oligonucleotides are complementary to the target nucleic acid over the entire length of the oligonucleotide. In certain embodiments, oligonucleotides are 99%, 95%, 90%, 85%, or 80% complementary to the target nucleic acid. In certain embodiments, oligonucleotides are at least 80% complementary to the target nucleic acid over the entire length of the oligonucleotide and comprise a portion that is 100% or fully complementary to a target nucleic acid. In certain embodiments, the portion of full complementarity is 6, 7, 8, 9, 10, 11, 12, 13, 14, 15, 16, 17, 18, 19, 20, 21, 22, 23, or 24 nucleobases in length.

[0319] In certain embodiments, oligonucleotides comprise one or more mismatched nucleobases relative to the target nucleic acid. In certain embodiments, antisense activity against the target is reduced by such mismatch, but activity against a non-target is reduced by a greater amount. Thus, in certain embodiments selectivity of the oligonucleotide is improved. In certain embodiments, the mismatch is specifically positioned within an oligonucleotide having a gapmer motif. In certain embodiments, the mismatch is at position 1, 2, 3, 4, 5, 6, 7, or 8 from the 5′-end of the gap region. In certain embodiments, the mismatch is at position 9, 8, 7, 6, 5, 4, 3, 2, 1 from the 3′-end of the gap region. In certain embodiments, the mismatch is at position 1, 2, 3, or 4 from the 5′-end of the wing region. In certain embodiments, the mismatch is at position 4, 3, 2, or 1 from the 3′-end of the wing region.

### B. UBE3A-ATS

[0320] In certain embodiments, oligomeric compounds comprise or consist of an oligonucleotide, or portion thereof, that is complementary to a target nucleic acid, wherein the target nucleic acid is UBE3A-ATS. In certain embodiments, UBE3A-ATS nucleic acid has the sequence set forth in SEQ ID NO: 1 (GENBANK Accession No: NC_000015.10_TRUNC_24821647_25441028), SEQ ID NO: 2915 (Ensemble Gene ID ENSG00000224078), or SEQ ID NO: 2916 (the cDNA of Ensemble transcript ENST00000554726.1).

[0321] In certain embodiments, an oligomeric compound complementary to SEQ ID NO: 1, SEQ ID NO: 2915, or SEQ ID NO: 2916 is capable of reducing UBE3A-ATS in a cell. In certain embodiments, an oligomeric compound complementary to SEQ ID NO: 1 is capable of increasing UBE3A RNA or protein in a cell. In certain embodiments, an oligomeric compound complementary to SEQ ID NO: 1, SEQ ID NO: 2915, or SEQ ID NO: 2916 is capable of increasing paternal UBE3A RNA or protein in a cell. In certain embodiments, the cell is in vitro. In certain embodiments, the cell is in a subject. In certain embodiments, the oligomeric compound consists of a modified oligonucleotide. In certain embodiments, an oligomeric compound complementary to SEQ ID NO: 1, SEQ ID NO: 2915, or SEQ ID NO: 2916 is capable of ameliorating one or more symptom or hallmark of a neurogenetic disorder when administered to a subject. In certain embodiments, the neurogenetic disorder is AS. In certain embodiments, the symptoms or hallmarks are selected from developmental delays, ataxia, speech impairment, sleep problems, seizures, and EEG abnormalities.

[0322] In certain embodiments, an oligomeric compound complementary to SEQ ID NO: 1, SEQ ID NO: 2915, or SEQ ID NO: 2916 is capable of reducing the detectable amount of UBE3A-ATS RNA in vitro by at least 10%, at least 20%, at least 30%, at least 40%, at least 50%, at least 60%, at least 70%, at least 80%, or at least 90%. In certain embodiments, an oligomeric compound complementary to SEQ ID NO: 1, SEQ ID NO: 2915, or SEQ ID NO: 2916 is capable of increasing the detectable amount of UBE3A protein in vitro by at least 10%, at least 20%, at least 30%, at least 40%, at least 50%, at least 60%, at least 70%, at least 80%, or at least 90%. In certain embodiments, an oligomeric compound complementary to SEQ ID NO: 1, SEQ ID NO: 2915, or SEQ ID NO: 2916 is capable of reducing the detectable amount of UBE3A-ATS RNA in the CSF of a subject by at least 10%, at least 20%, at least 30%, at least 40%, at least 50%, at least 60%, at least 70%, at least 80%, or at least 90%. In certain embodiments, an oligomeric compound complementary to SEQ ID NO: 1, SEQ ID NO: 2915, or SEQ ID NO: 2916 is capable of increasing the detectable amount of UBE3A protein in the CSF of a subject by at least 10%, at least 20%, at least 30%, at least 40%, at least 50%, at least 60%, at least 70%, at least 80%, or at least 90%.

### C. Certain Target Nucleic Acids in Certain Tissues

[0323] In certain embodiments, oligomeric compounds comprise or consist of an oligonucleotide comprising a portion that is complementary to a target nucleic acid, wherein the target nucleic acid is expressed in a pharmacologically relevant tissue. In certain embodiments, the pharmacologically relevant tissues are the cells and tissues that comprise the central nervous system. Such tissues include the cortex, hippocampus, and spinal cord.

### VI. Certain Pharmaceutical Compositions

[0324] In certain embodiments, described herein are pharmaceutical compositions comprising one or more oligomeric compounds. In certain embodiments, the one or more oligomeric compounds each consists of a modified oligonucleotide. In certain embodiments, the pharmaceutical composition comprises a pharmaceutically acceptable diluent or carrier. In certain embodiments, a pharmaceutical composition comprises or consists of a sterile saline solution and one or more oligomeric compound. In certain embodiments, the sterile saline is pharmaceutical grade saline. In certain embodiments, a pharmaceutical composition comprises or consists of one or more oligomeric compound and sterile water. In certain embodiments, the sterile water is pharmaceutical grade water. In certain embodiments, a pharmaceutical composition comprises or consists of one or more oligomeric compound and phosphate-buffered saline (PBS). In certain embodiments, the sterile PBS is pharmaceutical grade PBS. In certain embodiments, a pharmaceutical composition comprises or consists of one or more oligomeric compound and artificial cerebrospinal fluid. In certain embodiments, the artificial cerebrospinal fluid is pharmaceutical grade.

[0325] In certain embodiments, a pharmaceutical composition comprises a modified oligonucleotide and artificial cerebrospinal fluid. In certain embodiments, a pharmaceutical composition consists of a modified oligonucleotide and artificial cerebrospinal fluid. In certain embodiments, a pharmaceutical composition consists essentially of a modified oligonucleotide and artificial cerebrospinal fluid. In certain embodiments, the artificial cerebrospinal fluid is pharmaceutical grade.

[0326] In certain embodiments, pharmaceutical compositions comprise one or more oligomeric compound and one or more excipients. In certain embodiments, excipients are selected from water, salt solutions, alcohol, polyethylene glycols, gelatin, lactose, amylase, magnesium stearate, tale, silicic acid, viscous paraffin, hydroxymethylcellulose and polyvinylpyrrolidone.

[0327] In certain embodiments, oligomeric compounds may be admixed with pharmaceutically acceptable active and/or inert substances for the preparation of pharmaceutical compositions or formulations. Compositions and methods for the formulation of pharmaceutical compositions depend on a number of criteria, including, but not limited to, route of administration, extent of disease, or dose to be administered.

[0328] In certain embodiments, pharmaceutical compositions comprising an oligomeric compound encompass any pharmaceutically acceptable salts of the oligomeric compound, esters of the oligomeric compound, or salts of such esters. In certain embodiments, pharmaceutical compositions comprising oligomeric compounds comprising one or more oligonucleotide, upon administration to a subject, including a human, are capable of providing (directly or indirectly) the biologically active metabolite or residue thereof. Accordingly, for example, the disclosure is also drawn to pharmaceutically acceptable salts of oligomeric compounds, prodrugs, pharmaceutically acceptable salts of such prodrugs, and other bioequivalents. Suitable pharmaceutically acceptable salts include, but are not limited to, sodium and potassium salts. In certain embodiments, prodrugs comprise one or more conjugate group attached to an oligonucleotide, wherein the conjugate group is cleaved by endogenous nucleases within the body.

[0329] Lipid moieties have been used in nucleic acid therapies in a variety of methods. In certain such methods, the nucleic acid, such as an oligomeric compound, is introduced into preformed liposomes or lipoplexes made of mixtures of cationic lipids and neutral lipids. In certain methods, DNA complexes with mono- or poly-cationic lipids are formed without the presence of a neutral lipid. In certain embodiments, a lipid moiety is selected to increase distribution of a pharmaceutical agent to a particular cell or tissue. In certain embodiments, a lipid moiety is selected to increase distribution of a pharmaceutical agent to fat tissue. In certain embodiments, a lipid moiety is selected to increase distribution of a pharmaceutical agent to muscle tissue.

[0330] In certain embodiments, pharmaceutical compositions comprise a delivery system. Examples of delivery systems include, but are not limited to, liposomes and emulsions. Certain delivery systems are useful for preparing certain pharmaceutical compositions including those comprising hydrophobic compounds. In certain embodiments, certain organic solvents such as dimethylsulfoxide are used.

[0331] In certain embodiments, pharmaceutical compositions comprise one or more tissue-specific delivery molecules designed to deliver the one or more pharmaceutical agents of the present invention to specific tissues or cell types. For example, in certain embodiments, pharmaceutical compositions include liposomes coated with a tissue-specific antibody.

[0332] In certain embodiments, pharmaceutical compositions comprise a co-solvent system. Certain of such co-solvent systems comprise, for example, benzyl alcohol, a nonpolar surfactant, a water-miscible organic polymer, and an aqueous phase. In certain embodiments, such co-solvent systems are used for hydrophobic compounds. A non-limiting example of such a co-solvent system is the VPD co-solvent system, which is a solution of absolute ethanol comprising 3% w/v benzyl alcohol, 8% w/v of the nonpolar surfactant Polysorbate 80™ and 65% w/v polyethylene glycol 300. The proportions of such co-solvent systems may be varied considerably without significantly altering their solubility and toxicity characteristics. Furthermore, the identity of co-solvent components may be varied: for example, other surfactants may be used instead of Polysorbate 80™; the fraction size of polyethylene glycol may be varied; other biocompatible polymers may replace polyethylene glycol, e.g., polyvinyl pyrrolidone; and other sugars or polysaccharides may substitute for dextrose.

[0333] In certain embodiments, pharmaceutical compositions are prepared for oral administration. In certain embodiments, pharmaceutical compositions are prepared for buccal administration. In certain embodiments, a pharmaceutical composition is prepared for administration by injection (e.g., intravenous, subcutaneous, intramuscular, intrathecal (IT), intracerebroventricular (ICV), etc.). In certain of such embodiments, a pharmaceutical composition comprises a carrier and is formulated in aqueous solution, such as water or physiologically compatible buffers such as Hanks's solution, Ringer's solution, or physiological saline buffer. In certain embodiments, other ingredients are included (e.g., ingredients that aid in solubility or serve as preservatives). In certain embodiments, injectable suspensions are prepared using appropriate liquid carriers, suspending agents and the like. Certain pharmaceutical compositions for injection are presented in unit dosage form, e.g., in ampoules or in multi-dose containers. Certain pharmaceutical compositions for injection are suspensions, solutions or emulsions in oily or aqueous vehicles, and may contain formulatory agents such as suspending, stabilizing and/or dispersing agents. Certain solvents suitable for use in pharmaceutical compositions for injection include, but are not limited to, lipophilic solvents and fatty oils, such as sesame oil, synthetic fatty acid esters, such as ethyl oleate or triglycerides, and liposomes.

[0334] Under certain conditions, certain compounds disclosed herein act as acids. Although such compounds may be drawn or described in protonated (free acid) form, or ionized and in association with a cation (salt) form, aqueous solutions of such compounds exist in equilibrium among such forms. For example, a phosphate linkage of an oligonucleotide in aqueous solution exists in equilibrium among free acid, anion and salt forms. Unless otherwise indicated, compounds described herein are intended to include all such forms. Moreover, certain oligonucleotides have several such linkages, each of which is in equilibrium. Thus, oligonucleotides in solution exist in an ensemble of forms at multiple positions all at equilibrium. The term “oligonucleotide” is intended to include all such forms. Drawn structures necessarily depict a single form. Nevertheless, unless otherwise indicated, such drawings are likewise intended to include corresponding forms. Herein, a structure depicting the free acid of a compound followed by the term “or a salt thereof” expressly includes all such forms that may be fully or partially protonated/de-protonated/in association with a cation. In certain instances, one or more specific cation is identified.

[0335] In certain embodiments, modified oligonucleotides or oligomeric compounds are in aqueous solution with sodium. In certain embodiments, modified oligonucleotides or oligomeric compounds are in aqueous solution with potassium. In certain embodiments, modified oligonucleotides or oligomeric compounds are in PBS. In certain embodiments, modified oligonucleotides or oligomeric compounds are in water. In certain such embodiments, the pH of the solution is adjusted with NaOH and/or HCl to achieve a desired pH.

[0336] Herein, certain specific doses are described. A dose may be in the form of a dosage unit. For clarity, a dose (or dosage unit) of a modified oligonucleotide or an oligomeric compound in milligrams indicates the mass of the free acid form of the modified oligonucleotide or oligomeric compound. As described above, in aqueous solution, the free acid is in equilibrium with anionic and salt forms. However, for the purpose of calculating dose, it is assumed that the modified oligonucleotide or oligomeric compound exists as a solvent-free, sodium-acetate free, anhydrous, free acid. For example, where a modified oligonucleotide or an oligomeric compound is in solution comprising sodium (e.g., saline), the modified oligonucleotide or oligomeric compound may be partially or fully de-protonated and in association with Na+ ions. However, the mass of the protons is nevertheless counted toward the weight of the dose, and the mass of the Na+ ions are not counted toward the weight of the dose. Thus, for example, a dose, or dosage unit, of 100 mg of Compound No. 1263518 equals the number of fully protonated molecules that weighs 100 mg. This would be equivalent to 106 mg of solvent-free, sodium-acetate free, anhydrous sodiated Compound No. 1263518. When an oligomeric compound comprises a conjugate group, the mass of the conjugate group is included in calculating the dose of such oligomeric compound. If the conjugate group also has an acid, the conjugate group is likewise assumed to be fully protonated for the purpose of calculating dose.

### VI. Certain Compositions

### 1. Compound No. 1065645

[0337] In certain embodiments, Compound No. 1065645 is characterized as a 5-10-5 MOE gapmer having a sequence (from 5′ to 3′) of CATCATGATCTTGGTAAGGC (SEQ ID NO: 1949), wherein each of nucleosides 1-5 and 16-20 (from 5′ to 3′) are 2′-MOE nucleosides and each of nucleosides 6-15 are 2′-β-D-deoxynucleosides, wherein the internucleoside linkages between nucleosides 2 to 3, 3 to 4, 4 to 5, 5 to 6, 16 to 17, and 17 to 18 are phosphodiester internucleoside linkages and the internucleoside linkages between nucleosides 1 to 2, 6 to 7, 7 to 8, 8 to 9, 9 to 10, 10 to 11, 11 to 12, 12 to 13, 13 to 14, 14 to 15, 15 to 6, 18 to 19, and 19 to 20 are phosphorothioate internucleoside linkages, and wherein each cytosine is a 5-methyl cytosine.

[0338] In certain embodiments, Compound No. 1065645 is represented by the following chemical notation: ^{m}CₑₛAₑₒTₑₒ^{m}CₑₒAₑₒT_{ds}G_{ds}A_{ds}T_{ds}^{m}C_{ds}T_{ds}T_{ds}G_{ds}G_{ds}T_{ds}AₑₒAₑₒGₑₛGₑₛ^{m}Cₑ (SEQ ID NO: 2917), wherein:
[0339] A=an adenine nucleobase,
[0340] mC=a 5-methyl cytosine nucleobase,
[0341] G=a guanine nucleobase,
[0342] T=a thymine nucleobase,
[0343] e=a 2′-MOE sugar moiety,
[0344] d=a 2′-β-D-deoxyribosyl sugar moiety,
[0345] s=a phosphorothioate internucleoside linkage, and
[0346] o=a phosphodiester internucleoside linkage.

[0347] In certain embodiments, Compound No. 1065645 is represented by the following chemical structure:

[chemical structure]

[0348] In certain embodiments, the sodium salt of Compound No. 1065645 is represented by the following chemical

[chemical structure]

### 2. Compound No. 1263517

[0349] In certain embodiments, Compound No. 1263517 is characterized as a 6-10-4 MOE gapmer having a sequence (from 5′ to 3′) of TCACCATTTTGACCTTCTTA (SEQ ID NO: 2751), wherein each of nucleosides 1-6 and 17-20 (from 5′ to 3′) are 2′-MOE nucleosides and each of nucleosides 7-16 are 2′-β-D-deoxynucleosides, 10 wherein the internucleoside linkages between nucleosides 2 to 3, 3 to 4, 4 to 5, 5 to 6, 6 to 7, and 17 to 18 are phosphodiester internucleoside linkages and the internucleoside linkages between nucleosides 1 to 2, 7 to 8, 8 to 9, 9 to 10, 10Oto 11, 11 to 12, 12 to 13, 13 to 14, 14 to 15, 15 to 16, 16 to 17, 18 to 19, and 19 to 20 are phosphorothioate internucleoside linkages, and wherein each cytosine is a 5-methyl cytosine.

[0350] In certain embodiments, Compound No. 1263517 is represented by the following chemical notation: Tₑₛ^{m}CₑₒAₑₒ^{m}Cₑₒ^{m}CₑₒAₑₒT_{ds}T_{ds}T_{ds}T_{ds}G_{ds}A_{ds}^{m}C_{ds}^{m}C_{ds}T_{ds}T_{ds}^{m}CₑₒTₑₛTₑₛAₑ (SEQ ID NO: 2918), wherein:
[0351] A=an adenine nucleobase,
[0352] mC=a 5-methyl cytosine nucleobase,
[0353] G=a guanine nucleobase,
[0354] T=a thymine nucleobase,
[0355] e=a 2′-MOE sugar moiety,
[0356] d=a 2′-β-D-deoxyribosyl sugar moiety,
[0357] s=a phosphorothioate internucleoside linkage, and
[0358] o=a phosphodiester internucleoside linkage.

[0359] In certain embodiments, Compound No. 1263517 is represented by the following chemical structure:

[chemical structure]

[0360] In certain embodiments, the sodium salt of Compound No. 1263517 is represented by the following chemical structure:

[chemical structure]

### 3. Compound No. 1263518

[0361] In certain embodiments, Compound No. 1263518 is characterized as a 6-10-4 MOE gapmer having a sequence (from 5′ to 3′) of TTCACCATTTTGACCTTCTT (SEQ ID NO: 2752), wherein each of nucleosides 1-6 and 17-20 (from 5′ to 3′) are 2′-MOE nucleosides and each of nucleosides 7-16 are 2′-β-D-deoxynucleosides, wherein the internucleoside linkages between nucleosides 2 to 3, 3 to 4, 4 to 5, 5 to 6, 6 to 7, and 17 to 18 are phosphodiester internucleoside linkages and the internucleoside linkages between nucleosides 1 to 2, 7 to 8, 8 to 9, to 10, 10 to 11, 11 to 12, 12 to 13, 13 to 14, 14 to 15, 15 to 16, 16 to 17, 18 to 19, and19 to 20 are phosphorothioate internucleoside linkages, and wherein each cytosine is a 5-methyl cytosine.

[0362] In certain embodiments, Compound No. 1263518 is represented by the following chemical notation: TₑₛTₑₒ^{m}CₑₒAₑₒ^{m}Cₑₒ^{m}CₑₒA_{ds}T_{ds}T_{ds}T_{ds}T_{ds}G_{ds}A_{ds}^{m}C_{ds}^{m}C_{ds}T_{ds}Tₑₒ^{m}CₑₛTₑₛTₑ (SEQ ID NO: 2919), wherein:
[0363] A=an adenine nucleobase,
[0364] mC=a 5-methyl cytosine nucleobase,
[0365] G=a guanine nucleobase,
[0366] T=a thymine nucleobase,
[0367] e=a 2′-MOE sugar moiety,
[0368] d=a 2′-β-D-deoxyribosyl sugar moiety,
[0369] s=a phosphorothioate internucleoside linkage, and
[0370] o=a phosphodiester internucleoside linkage.

[0371] In certain embodiments, Compound No. 1263518 is represented by the following chemical structure:

[chemical structure]

[0372] In certain embodiments, the sodium salt of Compound No. 1263518 is represented by the following chemical structure:

[chemical structure]

### 4. Compound No. 1263533

[0373] In certain embodiments, Compound No. 1263533 is characterized as a 6-10-4 MOE gapmer having a sequence (from 5′ to 3′) of GCATACCCAGGGTAGGATTC (SEQ ID NO: 765), wherein each of nucleosides 1-6 and 17-20 (from 5′ to 3′) are 2′-MOE nucleosides and each of nucleosides 7-16 are 2′-β-D-deoxynucleosides, wherein the internucleoside linkages between nucleosides 2 to 3, 3 to 4, 4 to 5, 5 to 6, 6 to 7, and 17 to 18 are phosphodiester internucleoside linkages and the internucleoside linkages between nucleosides 1 to 2, 7 to 8, 8 to 9, to 10, 10Oto 11, 11 to 12, 12 to 13, 13 to 14, 14 to 15, 15 to 16, 16 to 17, 18 to 19, and 19 to 20 are phosphorothioate internucleoside linkages, and wherein each cytosine is a 5-methyl cytosine.

[0374] In certain embodiments, Compound No. 1263533 is represented by the following chemical notation: Gₑₛ^{m}CₑₒAₑₒTₑₒAₑₒ^{m}Cₑₒ^{m}C_{ds}^{m}C_{ds}A_{ds}G_{ds}G_{ds}G_{ds}T_{ds}A_{ds}G_{ds}G_{ds}AₑₒTₑₛTₑₛ^{m}Cₑ (SEQ ID NO: 2920), wherein:
[0375] A=an adenine nucleobase,
[0376] mC=a 5-methyl cytosine nucleobase,
[0377] G=a guanine nucleobase,
[0378] T=a thymine nucleobase,
[0379] e=a 2′-MOE sugar moiety,
[0380] d=a 2′-β-D-deoxyribosyl sugar moiety,
[0381] s=a phosphorothioate internucleoside linkage, and
[0382] o=a phosphodiester internucleoside linkage.

[0383] In certain embodiments, Compound No. 1263533 is represented by the following chemical structure:

[chemical structure]

[0384] In certain embodiments, the sodium salt of Compound No. 1263533 is represented by the chemical structure:

[chemical structure]

### 5. Compound No. 1273039

[0385] In certain embodiments, Compound No. 1273039 is characterized as a 4-8-6 MOE gapmer having a sequence (from 5′ to 3′) of ACGCAATGTATCAGGCAA (SEQ ID NO: 2866), wherein each of nucleosides 1-4 and 13-18 (from 5′ to 3′) are 2′-MOE nucleosides and each of nucleosides 5-12 are 2′-β-D-deoxynucleosides, wherein the internucleoside linkages between nucleosides 2 to 3, 3 to 4, 13 to 14, 14 to 15, and 15 to 16 are phosphodiester internucleoside linkages and the internucleoside linkages between nucleosides 1 to 2, 4 to 5, 5 to 6, to 7, 7 to 8, 8 to 9, 9 to 10, 10 to 11, 11 to 12, 12 to 13, 16 to 17, and 17 to 18 are phosphorothioate internucleoside linkages, and wherein each cytosine is a 5-methyl cytosine.

[0386] In certain embodiments, Compound No. 1273039 is represented by the following chemical notation: Aₑₛ^{m}CₑₒGₑₒ^{m}CₑₛA_{ds}A_{ds}T_{ds}G_{ds}T_{ds}A_{ds}T_{ds}^{m}C_{ds}AₑₒGₑₒGₑₒ^{m}CₑₛAₑₛAₑ (SEQ ID NO: 2921), wherein:
[0387] A=an adenine nucleobase,
[0388] mC=a 5-methyl cytosine nucleobase,
[0389] G=a guanine nucleobase,
[0390] T=a thymine nucleobase,
[0391] e=a 2′-MOE sugar moiety,
[0392] d=a 2′-β-D-deoxyribosyl sugar moiety,
[0393] s=a phosphorothioate internucleoside linkage, and
[0394] o=a phosphodiester internucleoside linkage.

[0395] In certain embodiments, Compound No. 1273039 is represented by the following chemical structure:

[chemical structure]

[0396] In certain embodiments, the sodium salt of Compound No. 1273039 is represented by the following chemical structure:

[chemical structure]

### 6. Compound No. 1273062

[0397] In certain embodiments, Compound No. 1273062 is characterized as a 5-10-5 MOE gapmer having a sequence (from 5′ to 3′) of ACCATTTTGACCTTCTTAGC (SEQ ID NO: 2873), wherein each of nucleosides 1-5 and 16-20 (from 5′ to 3′) are 2′-MOE nucleosides and each of nucleosides 6-15 are 2′-β-D-deoxynucleosides, wherein the internucleoside linkages between nucleosides 2 to 3, 3 to 4, 4 to 5, 5 to 6, 16 to 17, and 17 to 18 are phosphodiester internucleoside linkages and the internucleoside linkages between nucleosides 1 to 2, 6 to 7, 7 to 8, to 9, 9 to 10, 10 to 11, 11 to 2, 12 to 13, 13 to 14, 14 to 15, o to 16, 18 to 19, and 19 to 20 are phospho rothioate internucleoside linkages, and wherein each cytosine is a 5-methyl cytosine.

[0398] In certain embodiments, Compound No. 1273062 is represented by the following chemical notation: Aₑₛ^{m}Cₑₒ^{m}CₑₒAₑₒTₑₒT_{ds}T_{ds}T_{ds}G_{ds}A_{ds}^{m}C_{ds}^{m}C_{ds}T_{ds}T_{ds}^{m}C_{ds}TₑₒTₑₒAₑₛGₑₛ^{m}Cₑ (SEQ ID NO: 2922), wherein:
[0399] A=an adenine nucleobase,
[0400] mC=a 5-methyl cytosine nucleobase,
[0401] G=a guanine nucleobase,
[0402] T=a thymine nucleobase,
[0403] e=a 2′-MOE sugar moiety,
[0404] d=a 2′-β-D-deoxyribosyl sugar moiety,
[0405] s=a phosphorothioate internucleoside linkage, and
[0406] o=a phosphodiester internucleoside linkage.

[0407] In certain embodiments, Compound No. 1273062 is represented by the following chemical structure:

[chemical structure]

[0408] In certain embodiments, the sodium salt of Compound No. 1273062 is represented by the following chemical structure:

[chemical structure]

### VIII. Certain Comparator Compounds

[0409] In certain embodiments, Compound No. 1219022 (SEQ ID NO: 2923), a surrogate of which (Compound #586_9) is provided in WO2017/081223 (incorporated herein by reference), was used as a comparator compound. Compound No. 1219022 is a mixed LNA/DNA oligonucleotide having a sugar motif of (from 5′ to 3′) llddldldddddddddllll, wherein each “l” represents an LNA sugar moiety and each “d” represents a 2′-β-D-deoxyribosyl sugar moiety; having a sequence of (from 5′ to 3′) AAATTATTTATACACCATCA (SEQ ID NO: 2905), wherein each “C” is a 5-methyl cytosine; and wherein each internucleoside linkage is a phosphorothioate internucleoside linkage. Compound #586_9 has cytosines at positions 13, 15, and 16 whereas Compound No. 1219022 5-methyl cytosines at those positions. According to Wan and Seth, “[i]ntroduction of the 5-methyl group on cytosine reduces the immunostimulatory profile of certain DNA oligonucleotides and also enhances nuclease stability” (J. Med. Chem. 2016, 59, 9645-9667).

[0410] In certain embodiments, Compound No. 1219023 (SEQ ID NO: 2924), a surrogate of which (Compound #572_7) is provided in WO2017/081223 (incorporated herein by reference), was used as a comparator compound. Compound No. 1219023 is a mixed LNA/DNA oligonucleotide having a sugar motif of (from 5′ to 3′) lllddldddddddddlll, wherein each “l” represents an LNA sugar moiety and each “d” represents a 2′-B-D-deoxyribosyl sugar moiety; having a sequence of (from 5′ to 3′) TTTATCAATATCTTCTCA (SEQ ID NO: 2906), wherein each “C” is a 5-methyl cytosine; and wherein each internucleoside linkage is a phosphorothioate internucleoside linkage. Compound #572_7 has cytosines at positions 12 and 15 whereas Compound No. 1219023 has 5-methyl cytosines at those positions.

[0411] In certain embodiments, Compound No. 1219024 (SEQ ID NO: 2925), a surrogate of which (Compound #591_1) is provided in WO2017/081223 (incorporated herein by reference), was used as a comparator compound. Compound No. 1219024 is a mixed LNA/DNA oligonucleotide having a sugar motif of (from 5′ to 3′) ldldlddddddddddddll, wherein each “l” represents an LNA sugar moiety and each “d” represents a 2′-B-D-deoxyribosyl sugar moiety; having a sequence of (from 5′ to 3′) GCACATTCTTTCTATACCT (SEQ ID NO: 2907), wherein each “C” is a 5-methyl cytosine; and wherein each internucleoside linkage is a phosphorothioate internucleoside linkage. Compound #591_1 has cytosines at positions 2, 4, 8, 12 and 17 whereas Compound No. 1219024 has 5-methyl cytosines at those positions.

[0412] In certain embodiments, Compound No. 1219025 (SEQ ID NO: 2926), a surrogate of which (Compound #169_52) is provided in WO2017/081223 (incorporated herein by reference), was used as a comparator compound. Compound No. 1219025 is a mixed LNA/DNA oligonucleotide having a sugar motif of (from 5′ to 3′) lldllddddddddddll, wherein each “l” represents an LNA sugar moiety and each “d” represents a 2′-β-D-deoxyribosyl sugar moiety; having a sequence of (from 5′ to 3′) TTATAGCCATTCTATCT (SEQ ID NO: 2908), wherein each “C” is a 5-methyl cytosine; and wherein each internucleoside linkage is a phosphorothioate internucleoside linkage. Compound #169_52 has cytosines at positions 7, 8, and 12 whereas Compound No. 1219025 has 5-methyl cytosines at those positions.

[0413] In certain embodiments, Compound No. 1219026 (SEQ ID NO: 2927), a surrogate of which (Compound #624_5) is provided in WO2017/081223 (incorporated herein by reference), was used as a comparator compound. Compound No. 1219026 is a mixed LNA/DNA oligonucleotide having a sugar motif of (from 5′ to 3′) ldlllddddddddllll, wherein each “l” represents an LNA sugar moiety and each “d” represents a 2′-β-D-deoxyribosyl sugar moiety; having a sequence of (from 5′ to 3′) CTCAAAGATCATTCTCA (SEQ ID NO: 2909), wherein each “C” is a 5-methyl cytosine; and wherein each internucleoside linkage is a phosphorothioate internucleoside linkage. Compound #624_5 has a cytosine at position 10 whereas Compound No. 1219026 has a 5-methyl cytosine at that position.

[0414] In certain embodiments, Compound No. 1219027 (SEQ ID NO: 2928), a surrogate of which (Compound #626_8) is provided in WO2017/081223 (incorporated herein by reference), was used as a comparator compound. Compound No. 1219027 is a mixed LNA/DNA oligonucleotide having a sugar motif of (from 5′ to 3′) ldldldldddddddddldll, wherein each “l” represents an LNA sugar moiety and each “d” represents a 2′-B-D-deoxyribosyl sugar moiety; having a sequence of (from 5′ to 3′) TTACACTTAATTATACTTCC (SEQ ID NO: 2910), wherein each “C” is a 5-methyl cytosine; and wherein each internucleoside linkage is a phosphorothioate internucleoside linkage. Compound #626_8 has cytosines at positions 4, 6, and 16 whereas Compound No. 1219024 has 5-methyl cytosines at those positions.

[0415] In certain embodiments, Compound No. 1219028 (SEQ ID NO: 2929), a surrogate of which (Compound #639_5) is provided in WO2017/081223 (incorporated herein by reference), was used as a comparator compound. Compound No. 1219028 is a mixed LNA/DNA oligonucleotide having a sugar motif of (from 5′ to 3′) ldddddddddddlldlll, wherein each “l” represents an LNA sugar moiety and each “d” represents a 2′-B-D-deoxyribosyl sugar moiety; having a sequence of (from 5′ to 3′) GTTTCCATCTACTATTAA (SEQ ID NO: 2911), wherein each “C” is a 5-methyl cytosine; and wherein each internucleoside linkage is a phosphorothioate internucleoside linkage. Compound #639_5 has cytosines at positions 5, 6, 9 and 12 whereas Compound No. 1219028 has 5-methyl cytosines at those positions.

[0416] In certain embodiments, Compound No. 1219029 (SEQ ID NO: 2930), a surrogate of which (Compound #642_12) is provided in WO2017/081223 (incorporated herein by reference), was used as a comparator compound. Compound No. 1219029 is a mixed LNA/DNA oligonucleotide having a sugar motif of (from 5′ to 3′) llddlddddddddddll, wherein each “l” represents an LNA sugar moiety and each “d” represents a 2′-B-D-deoxyribosyl sugar moiety; having a sequence of (from 5′ to 3′) CTGTATACACCATCCCA (SEQ ID NO: 2912), wherein each “C” is a 5-methyl cytosine; and wherein each internucleoside linkage is a phosphorothioate internucleoside linkage. Compound #642_12 has cytosines at positions 8, 10, 11, 14 and 15 whereas Compound No. 1219029 has 5-methyl cytosines at those positions.

[0417] In certain embodiments, Compound No. 1219030 (SEQ ID NO: 2931), a surrogate of which (Compound #304_6) is provided in WO2017/081223 (incorporated herein by reference), was used as a comparator compound. Compound No. 1219030 is a mixed LNA/DNA oligonucleotide having a sugar motif of (from 5′ to 3′) lddllddddddddllll, wherein each “l” represents an LNA sugar moiety and each “d” represents a 2′-β-D-deoxyribosyl sugar moiety, having a sequence of (from 5′ to 3′) AGTTCTACTATACTTTC (SEQ ID NO: 2913), wherein each “C” is a 5-methyl cytosine; and wherein each internucleoside linkage is a phosphorothioate internucleoside linkage. Compound #304_6 has cytosines at positions 8 and 13 whereas Compound No. 1219030 has 5-methyl cytosines at those positions.

[0418] In certain embodiments, Compound No. 1219031 (SEQ ID NO: 2932), a surrogate of which (Compound #573_8) is provided in WO2017/081223 (incorporated herein by reference), was used as a comparator compound. Compound No. 1219031 is a mixed LNA/DNA oligonucleotide having a sugar motif of (from 5′ to 3′) llddldldddddddddddll, wherein each “l” represents an LNA sugar moiety and each “d” represents a 2′-β-D-deoxyribosyl sugar moiety; having a sequence of (from 5′ to 3′) TATACCTTTCTTTAACCCTT (SEQ ID NO: 2914), wherein each “C” is a 5-methyl cytosine; and wherein each internucleoside linkage is a phosphorothioate internucleoside linkage. Compound #573_8 has cytosines at positions 6, 10, 16, 17, and 18 whereas Compound No. 1219031 has cytosines at those positions.

[0419] Compound Nos. 1219022-1219031 (relating to Compound Nos. #5869, #5727, #591_1, #169_52, #6245, #6268, #639_5 #642_12, #3046, #5738, respectively) were selected as comparator compounds from Example 7 of WO2017/081223, which provides a subset of active compounds “selected for potency and efficacy testing.”

[0420] In certain embodiments, compounds described herein are superior relative to compounds described in WO2017/081223 because they demonstrate one or more improved properties, such as in vivo tolerability.

[0421] For example, as described herein, certain compounds Compound No. 1263517, Compound No. 1263518, Compound No. 1263533, Compound No. 1273039, and Compound No. 1273062 achieved 3-hour FOB scores in mice of 1.0 (Table 88), 0.0 (Table 88), 1.0 (Table 88), 1.0 (Table 96), and 0.0 (Table 96), respectively, whereas each of comparator compounds Compound No. 1219022, Compound No. 1219024, Compound No. 1219025, Compound No. 1219028, Compound No. 1219029, Compound No. 1219030, and Compound No. 1219031 achieved 3-hour FOB scores in mice of 7.0, 5.3, 4.0, 6.0, 6.3, 5.0, and 5.3 (Table 119), respectively. Therefore, certain compounds described herein are more tolerable than comparator compounds Compound No. 1219022, Compound No. 1219024, Compound No. 1219025, Compound No. 1219028, Compound No. 1219029, Compound No. 1219030, and Compound No. 1219031 in this assay.

[0422] For example, as described herein, certain compounds Compound No. 1065645, Compound No. 1263517, Compound No. 1263518, Compound No. 1263533, Compound No. 1273039, and Compound No. 1273062 each achieved 2-week FOB scores in mice of 0.0 (Example 12, Table 112), whereas Compound No. 1219023, Compound No. 1219024, Compound No. 1219025, Compound No. 1219026, Compound No. 1219028, Compound No. 1219029, Compound No. 1219030, and Compound No. 1219031 achieved 2-week delayed FOB scores in mice of 3.5, 6.5, 6.0, 6.0, 6.0, 6.0, 6.0, 5.0, and 6.0, respectively (Table 119). Therefore, certain compounds described herein are more tolerable than comparator compounds Compound No. 1219023 and Compound No. 1219026 in this assay.

[0423] For example, as described herein, certain compounds Compound No. 1065645, Compound No. 1263517, Compound No. 1263518, Compound No. 1263533, Compound No. 1273039, and Compound No. 1273062 do not cause a significant difference in body weight as compared to PBS-treated rats in an 8-week study, whereas treatment with Compound No. 1219027 leads to a greater than 10% weight loss compared to PBS-treated rats (p-value <0.05, Table 120). Therefore, certain compounds described herein are more tolerable than comparator Compound No. 1219027 in this assay.

### IX. Certain Hotspot Regions

[0424] In certain embodiments, nucleobases in the ranges specified below comprise a hotspot region of UBE3A-ATS. In certain embodiments, modified oligonucleotides that are complementary to a hotspot region of UBE3A-ATS achieve an average of more than 50% reduction of UBE3A-ATS RNA in vitro in the standard cell assay.

### 1. Nucleobases 461,413-461,487 of SEO ID NO: 1

[0425] In certain embodiments, nucleobases 461,413-461,487 of SEQ ID NO: 1 comprise a hotspot region. In certain embodiments, modified oligonucleotides are complementary to a portion of nucleobases 461,413-461,487 of SEQ ID NO: 1. In certain embodiments, modified oligonucleotides are 20 nucleobases in length. In certain embodiments, modified oligonucleotides are 18 nucleobases in length. In certain embodiments, modified oligonucleotides are gapmers. In certain embodiments, the gapmers are MOE gapmers. In certain embodiments, the internucleoside linkages of the modified oligonucleotides are phosphorothioate internucleoside linkages and phosphodiester internucleoside linkages. In certain embodiments, the phosphodiester (“o”) and phosphorothioate (“s”) internucleoside linkages are arranged in order from 5′ to 3′: soooossssssssssooss, sooooossssssssssoss, soooosssssssssoss, sooosssssssssooss, sooossssssssssoooss, or soosssssssssoooss.

[0426] The nucleobase sequences of SEQ ID Nos: 1053, 1329, 1501, 1576, 1873, 1949, 2025, 2096, 2245, 2512, 2591, 2680-2682, and 2844 are complementary to a portion of nucleobases 461,413-461,487 of SEQ ID NO: 1.

[0427] The nucleobase sequence of Compound Nos: 749901-749904, 1065641-1065646, 1165562-1165563, 1165857-1165858, and 1273001 are complementary to a portion of nucleobases 461,413-461,487 of SEQ ID NO: 1.

[0428] In certain embodiments, modified oligonucleotides complementary to a portion of nucleobases 461,413-461,487 of SEQ ID NO: 1 achieve at least 36% reduction of UBE3A-ATS RNA in vitro in the standard cell assay.

[0429] In certain embodiments, modified oligonucleotides complementary to a portion of nucleobases 461,413-461,487 of SEQ ID NO: 1 achieve an average of 60% reduction of UBE3A-ATS RNA in vitro in the standard cell assay.

### 2. Nucleobases 468,968-469,013 of SEO ID NO: 1

[0430] In certain embodiments, nucleobases 468,968-469,013 of SEQ ID NO: 1 comprise a hotspot region. In certain embodiments, modified oligonucleotides are complementary to a portion of nucleobases 468,968-469,013 of SEQ ID NO: 1. In certain embodiments, modified oligonucleotides are 20 nucleobases in length. In certain embodiments, modified oligonucleotides are 18 nucleobases in length. In certain embodiments, modified oligonucleotides are gapmers. In certain embodiments, the gapmers are MOE gapmers. In certain embodiments, the internucleoside linkages of the modified oligonucleotides are phosphorothioate internucleoside linkages and phosphodiester internucleoside linkages. In certain embodiments, the phosphodiester (“o”) and phosphorothioate (“s”) internucleoside linkages are arranged in order from 5′ to 3′: soooossssssssssooss, sooooossssssssssoss, soooosssssssssoss, sooosssssssssooss, sooossssssssssoooss, or soosssssssssoooss.

[0431] The nucleobase sequences of SEQ ID Nos: 376, 377, 2751-2756, 2773-2776, 2872, 2873, 2876-2878 are complementary to a portion of nucleobases 468,968-469,013 of SEQ ID NO: 1.

[0432] The nucleobase sequence of Compound Nos: 750031-750032, 1263408-1263411, 1263426, 1263441, 1263460-1263465, 1263486-1263492, 1263517-1263523, 1273061, 1273062, and 1273065-1273067 are complementary to a portion of nucleobases 468,968-469,013 of SEQ ID NO: 1.

[0433] In certain embodiments, modified oligonucleotides complementary to a portion of nucleobases 468,968-469,013 of SEQ ID NO: 1 achieve at least 75% reduction of UBE3A-ATS RNA in vitro in the standard cell assay.

[0434] In certain embodiments, modified oligonucleotides complementary to a portion of nucleobases 468,968-469,013 of SEQ ID NO: 1 achieve an average of 78% reduction of UBE3A-ATS RNA in vitro in the standard cell assay. In certain embodiments, modified oligonucleotides complementary to a portion of nucleobases 468,968-469,013 of SEQ ID NO: 1 achieve an average of 410% upregulation of UBE3A-ATS RNA in vitro at 6.7 M in cell culture.

### 3. Nucleobases 483,965-484,003 of SEO ID NO: 1

[0435] In certain embodiments, nucleobases 483,965-484,003 of SEQ ID NO: 1 comprise a hotspot region. In certain embodiments, modified oligonucleotides are complementary to a portion of 483,965-484,003 of SEQ ID NO: 1. In certain embodiments, modified oligonucleotides are 20 nucleobases in length. In certain embodiments, modified oligonucleotides are 18 nucleobases in length. In certain embodiments, modified oligonucleotides are gapmers. In certain embodiments, the gapmers are MOE gapmers. In certain embodiments, the internucleoside linkages of the modified oligonucleotides are phosphorothioate internucleoside linkages and phosphodiester internucleoside linkages. In certain embodiments, the phosphodiester (“o”) and phosphorothioate (“s”) internucleoside linkages are arranged in order from 5′ to 3′: soooossssssssssooss, sooooossssssssssoss, soooosssssssssoss, sooosssssssssooss, sooossssssssssoooss, or soosssssssssoooss.

[0436] The nucleobase sequences of SEQ ID Nos: 172, 764-770, 995, 1445, 1668, 1743, 2255, 2595, 2762-2767 are complementary to a portion of nucleobases 483,965-484,003 of SEQ ID NO: 1.

[0437] The nucleobase sequence of Compound Nos: 617557, 699781, 750138-750144, 1065918-1065921, 1165621, 1165878, and 1263532-1263557 are complementary to a portion of nucleobases 483,965-484,003 of SEQ ID NO: 1.

[0438] In certain embodiments, modified oligonucleotides complementary to a portion of nucleobases 483,965-484,003 of SEQ ID NO: 1 achieve at least 24% reduction of UBE3A-ATS RNA in vitro in the standard cell assay.

[0439] In certain embodiments, modified oligonucleotides complementary to nucleobases 483,965-484,003 of SEQ ID NO: 1 achieve an average of 65% reduction of UBE3A-ATS RNA in vitro in the standard cell assay. In certain embodiments, modified oligonucleotides complementary to a portion of nucleobases 468,968-469,013 of SEQ ID NO: 1 achieve an average of 330% upregulation of UBE3A-ATS RNA in vitro at 6.7 M in cell culture.

### 4. Additional Hotspot Regions

[0440] In certain embodiments, the ranges described in the Table below comprise hotspot regions. Each hotspot region begins with the nucleobase of SEQ ID NO: 1 identified in the “Start Site SEQ ID NO: 1” column and ends with the nucleobase of SEQ ID NO: 1 identified in the “Stop Site SEQ ID NO: 1” column. In certain embodiments, modified oligonucleotides are complementary within any of the hotspot regions 1-61, as defined in the table below. In certain embodiments, modified oligonucleotides are 18 nucleobases in length. In certain embodiments, modified oligonucleotides are 20 nucleobases in length. In certain embodiments, modified oligonucleotides are gapmers. In certain embodiments, modified oligonucleotides are 4-8-6, 6-8-4, 5-8-5, 4-10-6, 6-10-4, or 5-10-5 MOE gapmers.

[0441] The nucleobase sequence of compounds listed in the “Compound ID in range” column in the table below are complementary to SEQ ID NO: 1 within the specified hotspot region. The nucleobase sequence of the oligonucleotides listed in the “SEQ ID NO: in range” column in the table below are complementary to the target sequence, SEQ ID NO: 1, within the specified hotspot region.

[0442] In certain embodiments, modified oligonucleotides complementary to nucleobases within the hotspot region achieve at least “Min. % Red.” (minimum % reduction, relative to untreated control cells) of UBE3A-ATS RNA in vitro in the standard cell assay, as indicated in the table below. In certain embodiments, modified oligonucleotides complementary to nucleobases within the hotspot region achieve an average of “Avg. % Red.” (average % reduction, relative to untreated control cells) of UBE3A-ATS RNA in vitro in the standard cell assay, as indicated in the table below. In certain embodiments, modified oligonucleotides complementary to nucleobases within the hotspot region achieve a maximum of “Max. % Red.” (maximum % reduction, relative to untreated control cells) of UBE3A-ATS RNA in vitro in the standard cell assay, as indicated in the table below.

TABLE 1
UBE3A-ATS Hotspots

| Hot- | Start Site | Stop Site | Min. | Max. | Avg. | | |
|---|---|---|---|---|---|---|---|
| spot | SEQ ID | SEQ ID | % | % | % | | |
| ID | NO: 1 | NO: 1 | Red. | Red. | Red. | Compound ID in range | SEQ ID NO: in range |
| 1 | 461413 | 461487 | 36 | 89 | 60 | 749901-749904, 1065641- | 1053, 1329, 1501, |
| | | | | | | 1065646, 1165562- | 1576, 1873, 1949, |
| | | | | | | 1165563, 1165857- | 2025, 2096, 2245, |
| | | | | | | 1165858, 1273001 | 2512, 2591, 2680- |
| | | | | | | | 2682, 2844 |
| 2 | 468968 | 469013 | 75 | 81 | 78 | 750031-750032, 1263408- | 376, 377, 2751-2756, |
| | | | | | | 1263411, 1263426, | 2773-2776, 2872, |
| | | | | | | 1263441, 1263460- | 2873, 2876-2878 |
| | | | | | | 1263465, 1263486- | |
| | | | | | | 1263492, 1263517- | |
| | | | | | | 1263523, 1273061, | |
| | | | | | | 1273062, 1273065- | |
| | | | | | | 1273067 | |
| 3 | 483965 | 484003 | 24 | 91 | 65 | 617557, 699781, 750138- | 172, 764-770, 995, |
| | | | | | | 750144, 1065918-1065921, | 1445, 1668, 1743, |
| | | | | | | 1165621, 1165878, | 2255, 2595, 2762- |
| | | | | | | 1263532-1263557 | 2767 |
| 4 | 349103# | 349150# | 35 | 82 | 56 | 750519-750533 | 181-195 |
| 5 | 457354 | 457405 | 37 | 85 | 66 | 749848, 1065574-1065576, | 552, 973, 1273, 1795, |
| | | | | | | 1165519-1165521, | 2162, 2237, 2370, |
| | | | | | | 1179839-1179840 | 2537, 2671 |
| 6 | 457899 | 457936 | 49 | 77 | 59 | 749852, 1065581-1065582 | 556, 1497, 1945 |
| 7 | 457969 | 458013 | 36 | 78 | 61 | 749853, 1065583-1065586, | 557, 1124, 1199, |
| | | | | | | 1165523-1165525 | 1647, 2021, 2089, |
| | | | | | | | 2464, 2538 |
| 8 | 458523 | 458558 | 64 | 77 | 71 | 749861-749862, 1065595 | 565, 566, 1050 |
| 9 | 458560 | 458627 | 45 | 81 | 64 | 749863-749867, 1065596- | 567-571, 1125, 1498, |
| | | | | | | 1065600, 1272999 | 1573, 1946, 2022, |
| | | | | | | | 2842 |
| 10 | 458935 | 458976 | 30 | 85 | 60 | 1065602-1065605, | 901, 1425, 1648, |
| | | | | | | 1165530-1165540, | 1724, 2091, 2092, |
| | | | | | | 1165853 | 2164, 2165, 2239, |
| | | | | | | | 2240, 2392-2393, |
| | | | | | | | 2465, 2511, 2539, |
| | | | | | | | 2540 |
| 11 | 460105 | 460137 | 43 | 82 | 60 | 749882, 1065615-1065619, | 586, 1126, 1201, |
| | | | | | | 1165547-1165549 | 1649, 1725, 2023, |
| | | | | | | | 2093, 2467, 2542 |
| 12 | 460348 | 460381 | 36 | 77 | 58 | 1065621-1065622, | 902, 976, 2167, 2242 |
| | | | | | | 1165550-1165551 | |
| 13 | 460641 | 460686 | 50 | 67 | 57 | 617531, 1065629-1065631 | 107, 1500, 1948, 2024 |
| 14 | 460974 | 461021 | 75 | 91 | 82 | 749893-749894, 1165855, | 597, 598, 2219, 2745- |
| | | | | | | 1263451-1263455, | 2749 |
| | | | | | | 1263473-1263478, | |
| | | | | | | 1263504-1263509 | |
| 15 | 461597 | 461627 | 50 | 85 | 68 | 1065651-1065655 | 904, 978, 1278, 1428, |
| | | | | | | | 1800 |
| 16 | 463502 | 463531 | 60 | 71 | 66 | 749931, 1065674-1065675 | 1503, 1578, 2708 |
| 17 | 463826 | 463872 | 50 | 71 | 62 | 749938, 749939, 1065680 | 1728, 2714, 2715 |
| 18 | 464377 | 464428 | 32 | 77 | 58 | 749951, 1065684-1065687, | 1280, 1356, 1802, |
| | | | | | | 1165572-1165577, | 1876, 2097, 2172, |
| | | | | | | 1273006-1273008 | 2247, 2398, 2471, |
| | | | | | | | 2546, 2727, 2849- |
| | | | | | | | 2851 |
| 19 | 464522 | 464575 | 47 | 77 | 62 | 749952-749954, 1065690, | 1504, 2098, 2728- |
| | | | | | | 1165578, 1263412- | 2730, 2757-2760, |
| | | | | | | 1263416, 1263427- | 2777-2781, 2879- |
| | | | | | | 1263431, 1263442- | 2881 |
| | | | | | | 1263446, 1263466- | |
| | | | | | | 1263469, 1263494- | |
| | | | | | | 1263499, 1263524- | |
| | | | | | | 1263530, 1273068- | |
| | | | | | | 1273070 | |
| 20 | 464994 | 465032 | 27 | 76 | 52 | 617457, 749957-749964, | 33, 907, 981, 1281, |
| | | | | | | 1065698-1065702, | 1357, 1877, 2136, |
| | | | | | | 1165866 | 2733-2739 |
| 21 | 465231 | 465266 | 23 | 83 | 63 | 749969, 1065706-1065713, | 318, 908, 1132, 1207, |
| | | | | | | 1165583-1165587, | 1432, 1655, 1730, |
| | | | | | | 1263403-1263407, | 1953, 2028, 2174, |
| | | | | | | 1263421-1263425, | 2248, 2400, 2473, |
| | | | | | | 1263436-1263440, | 2548, 2750, 2768- |
| | | | | | | 1263456, 1263479- | 2772, 2875 |
| | | | | | | 1263485, 1263510- | |
| | | | | | | 1263516, 1273063, | |
| | | | | | | 1273064 | |
| 22 | 465372 | 465413 | 33 | 73 | 54 | 749972, 1065717-1065719, | 321, 1058, 1358, |
| | | | | | | 1165588-1165592, | 1878, 2099, 2137, |
| | | | | | | 1165867-1165869 | 2175, 2249, 2401, |
| | | | | | | | 2475, 2514, 2593 |
| 23 | 465600 | 465631 | 65 | 68 | 67 | 749975, 1065727-1065728, | 324, 1433, 1731, |
| | | | | | | 1272944-1272947 | 2787-2790 |
| 24 | 466244 | 466282 | 38 | 68 | 54 | 1065742-1065744, | 1434, 1657, 1732, |
| | | | | | | 1165595-1165598 | 2176, 2251, 2403, |
| | | | | | | | 2549 |
| 25 | 466529 | 466570 | 31 | 80 | 57 | 617460, 749989-749998, | 36, 338-346, 911, 985, |
| | | | | | | 1065760-1065762 | 1435 |
| 26 | 466979 | 467014 | 51 | 75 | 65 | 617461, 750000-750005, | 37, 347-351, 1806 |
| | | | | | | 1065764 | |
| 27 | 467043 | 467095 | 44 | 93 | 69 | 617539, 750006, 1065765- | 115, 352, 1061, 1361, |
| | | | | | | 1065767, 1272943, | 1881, 2786, 2803, |
| | | | | | | 1272960, 1273005 | 2848 |
| 28 | 468335 | 468372 | 42 | 68 | 56 | 1065781-1065783, | 1062, 1362, 1882, |
| | | | | | | 1165609, 1165875 | 2139, 2405 |
| 29 | 475827 | 475877 | 39 | 71 | 57 | 617470, 1065830-1065834 | 46, 1065, 1365, 1513, |
| | | | | | | | 1588, 1961 |
| 30 | 482148 | 482181 | 49 | 70 | 68 | 750122, 1065889-1065890, | 748, 919, 993, 2406 |
| | | | | | | 1165612 | |
| 31 | 487589 | 487629 | 73 | 79 | 76 | 750172, 1065953-1065955, | 798, 997, 1297, 1818, |
| | | | | | | 1272973, 1272974 | 2816, 2817 |
| 32 | 487772 | 487826 | 44 | 73 | 62 | 750175-750177, 1065957 | 801-803, 1373 |
| 33 | 489873 | 489927 | 52 | 73 | 59 | 750195-750196, 1065989 | 398, 399, 1375 |
| 34 | 493831 | 493860 | 44 | 63 | 56 | 750202-750204 | 405-407 |
| 35 | 499081 | 499119 | 47 | 70 | 55 | 1066036-1066038 | 1078, 1378, 1898 |
| 36 | 500605 | 500658 | 36 | 66 | 58 | 750265-750266, 1066064- | 683, 684, 929, 1004 |
| | | | | | | 1066065 | |
| 37 | 500846 | 500905 | 30 | 86 | 55 | 750269-750270, 1066073- | 687-688, 1155, 1230, |
| | | | | | | 1066077, 1165670 | 1678, 1976, 2051, |
| | | | | | | | 2562 |
| 38 | 501335 | 501375 | 42 | 67 | 56 | 1066091-1066094, | 1156, 1231, 1679, |
| | | | | | | 1272975-1272977 | 1753, 2818-2820 |
| 39 | 502125 | 502157 | 65 | 79 | 72 | 750291, 1066119-1066121 | 708, 1531, 1606, 1979 |
| 40 | 502194 | 502228 | 51 | 88 | 65 | 750292, 1066124-1066125 | 709, 1233, 1681 |
| 41 | 502416 | 502452 | 49 | 59 | 54 | 1066130-1066132 | 1308, 1829, 1904 |
| 42 | 502580 | 502618 | 57 | 59 | 58 | 750295, 1066140-1066142 | 712, 1234, 1682, 1756 |
| 43 | 503427 | 503461 | 36 | 73 | 61 | 750301, 1066185, 1165724 | 718, 1983, 2197 |
| 44 | 503636 | 503675 | 55 | 72 | 62 | 750307-750308, 1066190 | 724, 725, 1759 |
| 45 | 503973 | 504034 | 20 | 81 | 56 | 617503-617505, 617581- | 79-81, 155-157, 302, |
| | | | | | | 617582, 750313-750324, | 731-736, 2059 |
| | | | | | | 750383, 1066202 | |
| 46 | 504088 | 504122 | 45 | 85 | 65 | 750325-750327, 1066206 | 245, 246, 737, 1760 |
| 47 | 504431 | 504460 | 49 | 70 | 57 | 1066218-1066219, | 1164, 2060, 2119, |
| | | | | | | 1165736-1165740 | 2276, 2427, 2495, |
| | | | | | | | 2574 |
| 48 | 506031 | 506071 | 33 | 66 | 52 | 750356, 750357, 1066274- | 275, 276, 1317, 1838, |
| | | | | | | 1066276 | 1913 |
| 49 | 508739 | 508780 | 20 | 83 | 56 | 617503-617504, 617580- | 79, 80, 155-157, 302, |
| | | | | | | 617582, 750313-750323, | 730-735, 2059 |
| | | | | | | 750383, 1066202 | |
| 50 | 509208 | 509271 | 46 | 68 | 63 | 750394-750395, 1066377- | 313-314, 1995, 2070 |
| | | | | | | 1066378 | |
| 51 | 510203 | 510247 | 36 | 77 | 60 | 750400-750401, 1066394- | 810, 811, 1175, 2071, |
| | | | | | | 1066395, 1165828 | 2440 |
| 52 | 510832 | 510872 | 44 | 70 | 55 | 1066418-1066421 | 1326, 1402, 1847, |
| | | | | | | | 1922 |
| 53 | 513442 | 513486 | 66 | 81 | 72 | 750436-750439 | 846-849 |

#The oligonucleotides described in this section are complementary to this hotspot region at multiple sites. These sites are described in detail in Table 4b herein below (Example 1).

### NONLIMITING DISCLOSURE AND INCORPORATION BY REFERENCE

[0443] Each of the literature and patent publications listed herein is incorporated by reference in its entirety. While certain compounds, compositions and methods described herein have been described with specificity in accordance with certain embodiments, the following examples serve only to illustrate the compounds described herein and are not intended to limit the same. Each of the references, GenBlank accession numbers, and the like recited in the present application is incorporated herein by reference in its entirety.

[0444] Although the sequence listing accompanying this filing identifies each sequence as either “RNA” or “DNA” as required, in reality, those sequences may be modified with any combination of chemical modifications. One of skill in the art will readily appreciate that such designation as “RNA” or “DNA” to describe modified oligonucleotides is, in certain instances, arbitrary. For example, an oligonucleotide comprising a nucleoside comprising a 2′-OH sugar moiety and a thymine base could be described as a DNA having a modified sugar (2′-OH in place of one 2′-H of DNA) or as an RNA having a modified base (thymine (methylated uracil) in place of an uracil of RNA). Accordingly, nucleic acid sequences provided herein, including, but not limited to those in the sequence listing, are intended to encompass nucleic acids containing any combination of natural or modified RNA and/or DNA, including, but not limited to such nucleic acids having modified nucleobases. By way of further example and without limitation, an oligomeric compound having the nucleobase sequence “ATCGATCG” encompasses any oligomeric compounds having such nucleobase sequence, whether modified or unmodified, including, but not limited to, such compounds comprising RNA bases, such as those having sequence “AUCGAUCG” and those having some DNA bases and some RNA bases such as “AUCGATCG” and oligomeric compounds having other modified nucleobases, such as “AT^{m}CGAUCG,” wherein ^{m}C indicates a cytosine base comprising a methyl group at the 5-position.

[0445] Certain compounds described herein (e.g., modified oligonucleotides) have one or more asymmetric center and thus give rise to enantiomers, diastereomers, and other stereoisomeric configurations that may be defined, in terms of absolute stereochemistry, as (R) or (S), as α or β such as for sugar anomers, or as (D) or (L), such as for amino acids, etc. Compounds provided herein that are drawn or described as having certain stereoisomeric configurations include only the indicated compounds. Compounds provided herein that are drawn or described with undefined stereochemistry include all such possible isomers, including their stereorandom and optically pure forms, unless specified otherwise. Likewise, tautomeric forms of the compounds herein are also included unless otherwise indicated. Unless otherwise indicated, compounds described herein are intended to include corresponding salt forms.

[0446] The compounds described herein include variations in which one or more atoms are replaced with a non-radioactive isotope or radioactive isotope of the indicated element. For example, compounds herein that comprise hydrogen atoms encompass all possible deuterium substitutions for each of the ¹H hydrogen atoms. Isotopic substitutions encompassed by the compounds herein include but are not limited to: ²H or ³H in place of ¹H, ¹³C or ¹⁴C in place of ¹²C, ¹N in place of ¹⁴N, ¹⁷O or ¹⁸O in place of ¹⁶O, and ³³S, ³⁴S, ³⁵S, or ³⁶S in place of ³²S. In certain embodiments, non-radioactive isotopic substitutions may impart new properties on the oligomeric compound that are beneficial for use as a therapeutic or research tool. In certain embodiments, radioactive isotopic substitutions may make the compound suitable for research or diagnostic purposes such as imaging.

### EXAMPLES

[0447] The following examples illustrate certain embodiments of the present disclosure and are not limiting. Moreover, where specific embodiments are provided, the inventors have contemplated generic application of those specific embodiments. For example, disclosure of an oligonucleotide having a particular motif provides reasonable support for additional oligonucleotides having the same or similar motif. And, for example, where a particular high-affinity modification appears at a particular position, other high-affinity modifications at the same position are considered suitable, unless otherwise indicated.

### Example 1: Effect of 5-10-5 MOE Gapmer Modified Oligonucleotides on Human UBE3A-ATS RNA In Vitro, Single Dose

[0448] Modified oligonucleotides complementary to human UBE3A-ATS nucleic acid were tested for their effect on UBE3A-ATS RNA levels in vitro.

[0449] The modified oligonucleotides in the tables below are 5-10-5 MOE gapmers. The gapmers are 20 nucleosides in length, wherein the central gap segment consists of ten 2′-β-D-deoxynucleosides and the 5′ and 3′ wing segments each consists of five 2′-MOE nucleosides. The sugar motif for the gampers is (from 5′ to 3′): eeeeeddddddddddeeeee; wherein ‘d’ represents a 2′-β-D-deoxyribosyl sugar moiety, and ‘e’ represents a 2′-MOE sugar moiety.

[0450] Each internucleoside linkage of Compound IDs 617441-617596 (in Tables 2 and 3) is a phosphorothioate internucleoside linkage. All other compounds (Tables 4-33) have an internucleoside linkage motif of (from 5′ to 3′): soooossssssssssooss, wherein each “s” represents a phosphorothioate internucleoside linkage and each “o” represents a phosphodiester internucleoside linkage.

[0451] All cytosine residues are 5-methylcytosines.

[0452] “Start site” indicates the 5′-most nucleoside to which the modified oligonucleotide is complementary in the human gene sequence. “Stop site” indicates the 3′-most nucleoside to which the modified oligonucleotide is complementary in the target nucleic acid sequence. Each modified oligonucleotide listed in the Tables below is 100% complementary to SEQ ID NO: 1 (GENBANK Accession No NC_000015.10 truncated from nucleotides to 25441028). Selected compounds in the table below are complementary to the target nucleic acid sequence at more than three specific sites. For these compounds, the “start site” and “stop site” values in the Tables below are indicated with a hashtag (#) and indicate only the first site to which the compound is complementary. Additional sites to which these compounds are complementary are indicated in Table 4b below.

[0453] Human IPSC cell derived iCell GABANeurons (Cellular Dynamics) were cultured per manufacturer instructions at 20,000-60,000 cells per well (as indicated in the table heading) and were treated with 5,000-10,000 nM of modified oligonucleotide (as indicated in the table heading) by free uptake. After a treatment period of approximately 6 days, total RNA was isolated from the cells and UBE3A-ATS RNA levels were measured by quantitative real-time RTPCR. Human UBE3A-ATS primer probe set RTS4796 (forward sequence CTCCCCCAGTTCTGGAATGA, designated herein as SEQ ID NO: 2; reverse sequence TACACAGGGATTTGAGCCTGCTA, designated herein as SEQ ID NO: 3; probe sequence CCCACAGATCAAGCATTCCCCAAAGA, designated herein as SEQ ID NO: 4) was used to measure RNA levels. UBE3A-ATS RNA levels were normalized to total RNA content, as measured by RIBOGREEN®. Reduction of UBE3A-ATS RNA is presented in the tables below as percent UBE3A-ATS RNA amount relative to untreated control (UTC) cells. Each table represents results from an individual assay plate. The values marked with an asterisk (*) indicate that the modified oligonucleotide is complementary to the amplicon region of the primer probe set. Additional assays may be used to measure the potency and efficacy of the modified oligonucleotides complementary to the amplicon region. “N.D.” indicates that a value was not determined in this experiment due to experimental error. However, activities of selected modified oligonucleotides, including those that are not defined in Example 1, are successfully demonstrated in dose-response studies herein below.

TABLE 2
Reduction of UBE3A-ATS RNA by 7,000 nM 5-10-5 MOE gapmers with PS
internucleoside linkages in vitro (60,000 cells/well)

| | SEQ ID | SEQ ID | | UBE3A- | |
|---|---|---|---|---|---|
| Compound | NO: 1 | NO: 1 | | ATS | SEQ ID |
| Number | Start Site | Stop Site | Sequence (5′ to 3′) | (% UTC) | NO |
| 617441 | 449466 | 449485 | ATGTTGCTTGCACTCCATCA | 85 | 17 |
| 617442 | 449945 | 449964 | ACAACATAAGGTCTTATTGT | 87 | 18 |
| 617443 | 450581 | 450600 | TTTTCAACTCCAGAATTTTC | 87 | 19 |
| 617444 | 451644 | 451663 | TTCAGTCTTATACAGAAATG | 94 | 20 |
| 617445 | 452473 | 452492 | GGACTGACACAGAAAACTGG | 115 | 21 |
| 617446 | 454843 | 454862 | AGGGTAGAAGACTAGCATAC | 111 | 22 |
| 617447 | 455272 | 455291 | GGCCATTCATTCAGCCACAC | 95 | 23 |
| 617448 | 455405 | 455424 | TAAAGATTTTATGAAAATAC | 104 | 24 |
| 617449 | 456040 | 456059 | TTTAGAACATGTGAATTTCA | 109 | 25 |
| 617450 | 457025 | 457044 | AGACATATCACAGTTGCTTG | 89 | 26 |
| 617451 | 457601 | 457620 | AATATAATGTAGTATGACCA | 59 | 27 |
| 617452 | 458989 | 459008 | GAGGACACTGGCACATCTAT | 59 | 28 |
| 617453 | 459376 | 459395 | TTAAATAATAAAATATATTT | 108 | 29 |
| | 459401 | 459420 | | | |
| 617454 | 461190 | 461209 | ATTGGAGCAAAAAGGGATCA | 45 | 30 |
| 617455 | 462327 | 462346 | AATTATTCCCTATATCCTGT | 45 | 31 |
| 617456 | 463905 | 463924 | CAACTGTTACCAAGACTTCA | 24 | 32 |
| 617457 | 465003 | 465022 | ATCTGCGAATAGAGGCCCTC | 44 | 33 |
| 617458 | 465460 | 465479 | AAGGTTTTTATTTCATCACT | 68 | 34 |
| 617459 | 465872 | 465891 | GCCCATGGATGGTTGTCAAA | 34 | 35 |
| 617460 | 466539 | 466558 | TAGGTTGCATAAAGCCAGGC | 23 | 36 |
| 617461 | 466981 | 467000 | CACACATCTTGTTCCCTCAA | 23 | 37 |
| 617462 | 467508 | 467527 | TTTTTTTAATCCTCTGATGA | 123 | 38 |
| 617463 | 467914 | 467933 | AGTCTCTTTTCTTTCGGTGC | 34 | 39 |
| 617464 | 468085 | 468104 | GGAAAGTTCTTCTCTCTCCT | 69 | 40 |
| 617465 | 469204 | 469223 | ATTTGGTCTAAAGTGAAGTT | 91 | 41 |
| 617466 | 470003 | 470022 | TTTTGTGAGATTTTTGAATA | 101 | 42 |
| 617467 | 471815 | 471834 | TGTTAAATGCTTTTCTAAAT | 80 | 43 |
| 617468 | 472985 | 473004 | CTGATGATTGATTGTTTCCT | 71 | 44 |
| 617469 | 474868 | 474887 | TATGATAATGTGTAGTTTTT | 110 | 45 |
| 617470 | 475850 | 475869 | AAGGGTAATACGGACCTCAT | 29 | 46 |
| 617471 | 476475 | 476494 | CTATTTTTTGCTTCCCTTAT | 56 | 47 |
| 617472 | 479448 | 479467 | GAATTCTTAGAAAGTTAATT | 118 | 48 |
| 617473 | 479585 | 479604 | TGCCATCTTCAAGACTAAGG | 33 | 49 |
| 617474 | 480527 | 480546 | AATGGAAAAGATGTATCACG | 92 | 50 |
| 617475 | 481063 | 481082 | AACTTTGGCAGCTATTCAAT | 88 | 51 |
| 617476 | 481522 | 481541 | GACACTAGGTTTTGCAAAAG | 63 | 52 |
| 617477 | 481663 | 481682 | TATGAATTTTCAATTCAATG | 155 | 53 |
| 617478 | 483415 | 483434 | CACTTAAGGGAACTTTCAGA | 84 | 54 |
| 617479 | 483933 | 483952 | GAGATGATGTTAAGCTTTCA | 75 | 55 |
| 617480 | 484344 | 484363 | TAAGACAAGTGGCCATGAAG | 92 | 56 |
| 617481 | 484760 | 484779 | CTCTGTTCTGTCTCAAAACA | 47 | 57 |
| 617482 | 485496 | 485515 | TATAAGAAAGAAGATTACAG | 132 | 58 |
| 617483 | 486358 | 486377 | AAATGTTAATAGACTGCGAT | 93 | 59 |
| 617484 | 486941 | 486960 | TTAAACTCCCCAGTCAAAAG | 108 | 60 |
| 617485 | 488180 | 488199 | ATTTACTTCAAACAGGAGCT | 42 | 61 |
| 617486 | 489476 | 489495 | TCAGGAAATTAAAGCATTCA | 81 | 62 |
| 617487 | 489630 | 489649 | CCTAACCTGGATCTCAGATA | 57 | 63 |
| 617488 | 493552 | 493571 | TACAGCAACCCTAGAAAACT | 121 | 64 |
| 617489 | 493893 | 493912 | ATCTTTGGCAGATGTAACCT | 63 | 65 |
| 617490 | 495750 | 495769 | GAGTATTATCCAAAAGAACA | 83 | 66 |
| 617491 | 497275 | 497294 | AAAGCCCAGGATTAGGCAGC | 63 | 67 |
| 617492 | 497366 | 497385 | CTACAAAGAGTGAATCATGA | 130 | 68 |
| 617493 | 498003 | 498022 | TAATCTTAAGTTTAAGTGGA | 68 | 69 |
| 617494 | 498883 | 498902 | AAAAAGACATAGAATGACAG | 100 | 70 |
| 617495 | 499237 | 499256 | AGATACAAATTTAAAAAAGT | 119 | 71 |
| 617496 | 499672 | 499691 | GGTAGCCCCAATACAGATTC | 62 | 72 |
| 617497 | 500044 | 500063 | CTTCAACAGCAGACTTGATC | 65 | 73 |
| 617498 | 501513 | 501532 | GGTCCACACAGAGTTCAAAT | 73 | 74 |
| 617499 | 501703 | 501722 | CTTTGGGACATCCCAAAGTT | 113 | 75 |
| 617500 | 502388 | 502407 | TACACATCTTGTATACAAGG | 60 | 76 |
| 617501 | 503258 | 503277 | TAATACTTTCTTGAGTAATA | 124 | 77 |
| 617502 | 503904 | 503923 | GGGTGGTTGGATTGCTTTAT | 47 | 78 |
| 617503 | 503977 | 503996 | CTGCACACTGTACAGGAGGG | 80 | 79 |
| | 508743 | 508762 | | | |
| 617504 | 503985 | 504004 | TTGATTCACTGCACACTGTA | 67 | 80 |
| | 508751 | 508770 | | | |
| 617505 | 504015 | 504034 | GTGCAGGAAGGAGGTTTTGT | 55 | 81 |
| 617506 | 504943 | 504962 | ATACAGTATATACATCATCC | 42 | 82 |
| 617507 | 505266 | 505285 | AAGTTTAAAACAAAAAAAGG | 119 | 83 |
| 617508 | 507068 | 507087 | AATGTCTGTTCTTTGTGGTA | 91 | 84 |
| 617509 | 507897 | 507916 | ATACCTGCTTTTGTGACAAT | 75 | 85 |
| 617510 | 508556 | 508575 | GAGTGTAGCTCATTTCAGAA | 74 | 86 |
| 617511 | 509785 | 509804 | TTTCTCAATGTCAACTCTCA | 68 | 87 |
| 617512 | 510721 | 510740 | CAAGCCGAATCTTGACATAC | 73 | 88 |
| 617513 | 511227 | 511246 | GACCAGAAAAGCTACATAGC | 87 | 89 |
| 617514 | 512575 | 512594 | ATTTTGTATATTGTAGCTTT | 105 | 90 |
| 617515 | 513295 | 513314 | CCATCTTTCTGTTATCTTGT | 51 | 91 |
| 617516 | 513982 | 514001 | CTTTGTTTCTTTTTAAGAAA | 108 | 92 |
| 617517 | 514259 | 514278 | ACCTTGACAACACCCTAGCT | 89 | 93 |
| 617518 | 515123 | 515142 | AAAAAGGAACCATAAACTAA | 117 | 94 |

TABLE 3
Reduction of UBE3A-ATS RNA by 7,000 nM 5-10-5 MOE gapmers with PS internucleoside
linkages in vitro (60,000 cells/well)

| | SEQ ID | SEQ ID | | UBE3A- | |
|---|---|---|---|---|---|
| Compound | NO: 1 | NO: 1 | | ATS | SEQ ID |
| Number | Start Site | Stop Site | Sequence (5′ to 3′) | (% UTC) | NO |
| 617461 | 466981 | 467000 | CACACATCTTGTTCCCTCAA | 29 | 37 |
| 617519 | 449812 | 449831 | GGTGTGTCAGCTGTGCTGGT | 62 | 95 |
| 617520 | 450498 | 450517 | ATCATACCTTCACTTTTTTT | 101 | 96 |
| 617521 | 450896 | 450915 | TTCATTGAGCTTCCTGGATA | 100 | 97 |
| 617522 | 451804 | 451823 | TTACTTCTTTTTCATTAAGT | 86 | 98 |
| 617523 | 454628 | 454647 | AGTAAACACTCCAACAAAAA | 126 | 99 |
| 617524 | 455049 | 455068 | GGTCTAAGCAAAATGTGAAG | 137 | 100 |
| 617525 | 455323 | 455342 | CAGTTAGGCCTGCTCCGAAT | 102 | 101 |
| 617526 | 455499 | 455518 | ACTCTGAAAATAGCCAATTT | 134 | 102 |
| 617527 | 456944 | 456963 | AGTATCTATCTACAATTAAA | 112 | 103 |
| 617528 | 457237 | 457256 | AATGGCTTAGCTACTCACCC | 72 | 104 |
| 617529 | 458254 | 458273 | CCTCTCTGCAAAACAAGAGA | 74 | 105 |
| 617530 | 459153 | 459172 | ATTACTCATTCTGGGAATGC | 35 | 106 |
| 617531 | 460667 | 460686 | GTTTTCAGCATGATTCTAAC | 46 | 107 |
| 617532 | 461259 | 461278 | CATATATAAAAATTAGAATG | 122 | 108 |
| 617533 | 463621 | 463640 | AATGCCACAAAGCTGGCTGT | 97 | 109 |
| 617534 | 464514 | 464533 | GTGCACAGATAATGACTAGA | 69 | 110 |
| 617535 | 465402 | 465421 | CAGTGAGAAGTCAATTGTCA | 67 | 111 |
| 617536 | 465580 | 465599 | TCCTTTAGCATTTCTATTAG | 28 | 112 |
| 617537 | 466423 | 466442 | AACATGTGCTTGCAAGCCAT | 46 | 113 |
| 617538 | 466701 | 466720 | AAATAACTGGATCTCATAAC | 55 | 114 |
| 617539 | 467064 | 467083 | CTTAGGAGAGAAACACTTTC | 56 | 115 |
| 617540 | 467546 | 467565 | TACATCCTGTAGGCTTTCTT | 55 | 116 |
| 617541 | 467961 | 467980 | ACTGAGAAATCTCTTGAATG | 92 | 117 |
| 617542 | 468624 | 468643 | TTGCTCTTTTTACTTTGTTC | 37 | 118 |
| 617543 | 469731 | 469750 | ACTCTAAGTTTTATTAATAG | 105 | 119 |
| 617544 | 470091 | 470110 | TTTGGAAGAGCTTAATAAAG | 110 | 120 |
| 617545 | 472023 | 472042 | TAGCTAGAATTTCAACTACT | 63 | 121 |
| 617546 | 474443 | 474462 | ATGTAGTATTTATTTCATTT | 120 | 122 |
| 617547 | 474957 | 474976 | GCCTAATATGTGTCATCCTG | 28 | 123 |
| 617548 | 475998 | 476017 | CCTCAATTCTATGGTTAGTT | 52 | 124 |
| 617549 | 479376 | 479395 | TCTTGGAGATGACTTCTCTG | 75 | 125 |
| 617550 | 479580 | 479599 | TCTTCAAGACTAAGGTAGGG | 54 | 126 |
| 617551 | 479654 | 479673 | AGTAAGGTCTGTTATTCTCC | 35 | 127 |
| 617552 | 480998 | 481017 | GCTATACAACAAAAAGAATT | 123 | 128 |
| 617553 | 481073 | 481092 | ACTGTGGAAAAACTTTGGCA | 54 | 129 |
| 617554 | 481582 | 481601 | ATAATCTACATGTATAGACC | 85 | 130 |
| 617555 | 481984 | 482003 | AAAAGCCAATTCTGAAATTC | 44 | 131 |
| 617556 | 483689 | 483708 | ATTCTCCTACCTCTCAGCCT | 107 | 132 |
| 617558 | 484654 | 484673 | AACTGTAGCAAATATACTAC | 110 | 133 |
| 617559 | 485236 | 485255 | AAATTACTGCTCTGTAAAAG | 93 | 134 |
| 617560 | 485886 | 485905 | GATTCAATGAAATAAAAAAT | 144 | 135 |
| 617561 | 486894 | 486913 | AATGACATAGCTTATGCTGT | 104 | 136 |
| 617562 | 488162 | 488181 | CTAGAAATTAAGACATCCCT | 63 | 137 |
| 617563 | 488563 | 488582 | GCCACACCATCAAAAGAACC | 77 | 138 |
| 617564 | 489518 | 489537 | TGGACCACCTAAGACCTCAA | 62 | 139 |
| 617565 | 489731 | 489750 | ACCGGTTCCCAATTTTCTCC | 82 | 140 |
| 617566 | 493655 | 493674 | GAGAGAATACGGCCCTGATG | 77 | 141 |
| 617567 | 494790 | 494809 | AACTTCAATCAGAGTAATAT | 117 | 142 |
| 617568 | 496045 | 496064 | GGCAAAGGAATGAAGAGACC | 69 | 143 |
| 617569 | 497328 | 497347 | GCCAATAACAAGAAAAGAGA | 96 | 144 |
| 617570 | 497416 | 497435 | ATCAAATTGGATGACCTAAA | 122 | 145 |
| 617571 | 498140 | 498159 | CAATGGATTTCAATTACACT | 54 | 146 |
| 617572 | 498893 | 498912 | ATTCTCCAACAAAAAGACAT | 93 | 147 |
| 617573 | 499276 | 499295 | GTAGCTACAAGAAGTAATTG | 117 | 148 |
| 617574 | 499958 | 499977 | AAAGAATGCCTATAAGAATT | 118 | 149 |
| 617575 | 500578 | 500597 | CTACTGGCATCAGTCAAAAC | 60 | 150 |
| 617576 | 501578 | 501597 | AAAAGGCAAGGCTAAGGAGT | 69 | 151 |
| 617577 | 502305 | 502324 | CCCACACAGGTCATTCATTC | 52 | 152 |
| 617578 | 503150 | 503169 | TGTATACACCATCCCAGAAA | 93 | 153 |
| 617579 | 503795 | 503814 | AAAATGCCAGTTTGTTGTAC | 60 | 154 |
| 617580 | 503973 | 503992 | ACACTGTACAGGAGGGTGTC | 69 | 155 |
| | 508739 | 508758 | | | |
| 617581 | 503981 | 504000 | TTCACTGCACACTGTACAGG | 70 | 156 |
| | 508747 | 508766 | | | |
| 617582 | 503993 | 504012 | AAATGATGTTGATTCACTGC | 36 | 157 |
| | 508759 | 508778 | | | |
| 617583 | 504551 | 504570 | AGAGTTTTCATGAATTCAGG | 46 | 158 |
| 617584 | 505011 | 505030 | GGTTTCTTTCATTAAATAGC | 63 | 159 |
| 617585 | 506396 | 506415 | GAGGCAACTCCTGAGAGCTG | 64 | 160 |
| 617586 | 507650 | 507669 | TTAAATGTCAGGAGGTCCCC | 57 | 161 |
| 617587 | 508201 | 508220 | TGTCATCTGATCTCACACAT | 86 | 162 |
| 617588 | 508772 | 508791 | CAAAGTCCAAGGGAAATGAT | 71 | 163 |
| 617589 | 510010 | 510029 | CACAGTAGAGGCAAATGAGA | 79 | 164 |
| 617590 | 511058 | 511077 | GACATTTAGGATGATGATAT | 72 | 165 |
| 617591 | 512158 | 512177 | GTTGTATTAATGGACTTTTG | 65 | 166 |
| 617592 | 513203 | 513222 | ATTTTTTGCATAAGTGCATT | 86 | 167 |
| 617593 | 513508 | 513527 | ACATTTCTTAGTTGAACAGT | 29 | 168 |
| 617594 | 514104 | 514123 | AGATTCTTCCCCAATCCCAT | 81 | 169 |
| 617595 | 514524 | 514543 | CTCACTTGTCTCCTTTTACC | 73 | 170 |
| 617596 | 515282 | 515301 | ACAATAAGGAAGAGCAAAAC | 104 | 171 |

TABLE 4
Reduction of UBE3A-ATS RNA by 5,000 nM 5-10-5 MOE gapmers with mixed PO/PS
internucleoside linkages in vitro (35,000 cells/well)

| | SEQ ID | SEQ ID | | UBE3A- | |
|---|---|---|---|---|---|
| Compound | NO: 1 | NO: 1 | | ATS | SEQ ID |
| Number | Start Site | Stop Site | Sequence (5′ to 3′) | (% UTC) | NO |
| 617456 | 463905 | 463924 | CAACTGTTACCAAGACTTCA | 22 | 32 |
| 617457 | 465003 | 465022 | ATCTGCGAATAGAGGCCCTC | 22 | 33 |
| 617460 | 466539 | 466558 | TAGGTTGCATAAAGCCAGGC | 35 | 36 |
| 617461 | 466981 | 467000 | CACACATCTTGTTCCCTCAA | 36 | 37 |
| 617557 | 483977 | 483996 | ATCATGTGCATACCCAGGGT | 9 | 172 |
| 705110 | 229870^{#} | 229889^{#} | TCACTCATTTTGTTCAGCTT | 33 | 173 |
| 705112 | 232607^{#} | 232626^{#} | GTTTTCACTCATTTTGTTCA | 61 | 174 |
| 750513 | 220331 | 220350 | ACAATTATTCTCATCATCGA | 113 | 175 |
| | 456700 | 456719 | | | |
| 750514 | 220346 | 220365 | CCTCAGCATCCTCAGACAAT | 80 | 176 |
| | 456715 | 456734 | | | |
| 750515 | 220359 | 220378 | TCTGGAATGAGTCCCTCAGC | 73 | 177 |
| | 456728 | 456747 | | | |
| 750516 | 220371 | 220390 | CTCAGATTGACATCTGGAAT | 123 | 178 |
| | 456740 | 456759 | | | |
| 750517 | 229869^{#} | 229888^{#} | CACTCATTTTGTTCAGCTTT | 15 | 179 |
| 750518 | 232608^{#} | 232627^{#} | AGTTTTCACTCATTTTGTTC | 67 | 180 |
| 750519 | 349103^{#} | 349122^{#} | GTCATCACCTCTCTTCAGGA | 22 | 181 |
| 750520 | 349105^{#} | 349124^{#} | AAGTCATCACCTCTCTTCAG | 35 | 182 |
| 750521 | 349107^{#} | 349126^{#} | TTAAGTCATCACCTCTCTTC | 55 | 183 |
| 750522 | 349109^{#} | 349128^{#} | TTTTAAGTCATCACCTCTCT | 37 | 184 |
| 750523 | 349111^{#} | 349130^{#} | ATTTTTAAGTCATCACCTCT | 45 | 185 |
| 750524 | 349113^{#} | 349132^{#} | TGATTTTTAAGTCATCACCT | 25 | 186 |
| 750525 | 349115^{#} | 349134^{#} | CATGATTTTTAAGTCATCAC | 55 | 187 |
| 750526 | 349117^{#} | 349136^{#} | AGCATGATTTTTAAGTCATC | 65 | 188 |
| 750527 | 349119^{#} | 349138^{#} | TGAGCATGATTTTTAAGTCA | 46 | 189 |
| 750528 | 349121^{#} | 349140^{#} | ATTGAGCATGATTTTTAAGT | 56 | 190 |
| 750529 | 349123^{#} | 349142^{#} | CTATTGAGCATGATTTTTAA | 60 | 191 |
| 750530 | 349125^{#} | 349144^{#} | TCCTATTGAGCATGATTTTT | 56 | 192 |
| 750531 | 349127^{#} | 349146^{#} | AATCCTATTGAGCATGATTT | 41 | 193 |
| 750532 | 349129^{#} | 349148^{#} | GTAATCCTATTGAGCATGAT | 26 | 194 |
| 750533 | 349131^{#} | 349150^{#} | GCGTAATCCTATTGAGCATG | 34 | 195 |
| 750534 | 349133^{#} | 349152^{#} | CAGCGTAATCCTATTGAGCA | 63 | 196 |
| 750535 | 349135^{#} | 349154^{#} | CTCAGCGTAATCCTATTGAG | 50 | 197 |
| 750536 | 349137^{#} | 349156^{#} | GCCTCAGCGTAATCCTATTG | 71 | 198 |
| 750537 | 349139^{#} | 349158^{#} | GGGCCTCAGCGTAATCCTAT | 48 | 199 |
| 750538 | 349141^{#} | 349160^{#} | CTGGGCCTCAGCGTAATCCT | 28 | 200 |
| 750539 | 349143^{#} | 349162^{#} | GGCTGGGCCTCAGCGTAATC | 75 | 201 |
| 750540 | 355254^{#} | 355273^{#} | TAGGCTGGGCCTCAGCGTAA | 32 | 202 |
| 750541 | 349147^{#} | 349166^{#} | CCTAGGCTGGGCCTCAGCGT | 98 | 203 |
| 750542 | 349149^{#} | 349168^{#} | CACCTAGGCTGGGCCTCAGC | 21 | 204 |
| 750543 | 349151^{#} | 349170^{#} | CTCACCTAGGCTGGGCCTCA | 55 | 205 |
| 750544 | 349153^{#} | 349172^{#} | TTCTCACCTAGGCTGGGCCT | 24 | 206 |
| 750545 | 349155^{#} | 349174^{#} | AATTCTCACCTAGGCTGGGC | 53 | 207 |
| 750546 | 349157^{#} | 349176^{#} | AAAATTCTCACCTAGGCTGG | 39 | 208 |
| 750547 | 349159^{#} | 349178^{#} | CCAAAATTCTCACCTAGGCT | 46 | 209 |
| 750548 | 349162^{#} | 349181^{#} | CTTCCAAAATTCTCACCTAG | 95 | 210 |
| 750549 | 349165^{#} | 349184^{#} | CCTCTTCCAAAATTCTCACC | 17 | 211 |
| 750550 | 349168^{#} | 349187^{#} | CATCCTCTTCCAAAATTCTC | 75 | 212 |
| 750551 | 349171^{#} | 349190^{#} | CAGCATCCTCTTCCAAAATT | 50 | 213 |
| 750552 | 349174^{#} | 349193^{#} | TCCCAGCATCCTCTTCCAAA | 70 | 214 |
| 750553 | 349177^{#} | 349196^{#} | GGATCCCAGCATCCTCTTCC | 53 | 215 |
| 750554 | 349346 | 349365 | GCCACCCACATGCCCTGCCC | 25 | 216 |
| | 409462 | 409481 | | | |
| 750555 | 349390^{#} | 349409^{#} | AGAGCTCACTGAAAGACACA | 63 | 217 |
| 750556 | 349392^{#} | 349411^{#} | GAAGAGCTCACTGAAAGACA | 85 | 218 |
| 750557 | 349442^{#} | 349461^{#} | GCAGGATCCACTCACCTATG | 27 | 219 |
| 750558 | 349957^{#} | 349976^{#} | CAGAGCTCAGCCTTGACCCA | 45 | 220 |
| 750559 | 350910^{#} | 350929^{#} | AGCTCAGTGCAGGAGACCAG | 56 | 221 |
| 750560 | 350914^{#} | 350933^{#} | CCACAGCTCAGTGCAGGAGA | 72 | 222 |
| 750561 | 350924^{#} | 350943^{#} | GATGTGCTCACCACAGCTCA | 115 | 223 |
| 750562 | 351544^{#} | 351563^{#} | GGAACCCTTTCCTGCCTGGA | 56 | 224 |
| 750563 | 353287^{#} | 353306^{#} | CAATATAAGGTTCTCATCAT | 42 | 225 |
| 750564 | 353293^{#} | 353312^{#} | TCAGGACAATATAAGGTTCT | 115 | 226 |
| 750565 | 353305^{#} | 353324^{#} | CATCACCTCTCTTCAGGACA | 37 | 227 |
| 750566 | 353356 | 353375 | TCTCACCTAGGCTAGGCCTC | 44 | 228 |
| | 407396 | 407415 | | | |
| 750567 | 353579^{#} | 353598^{#} | AGCTCACTGAAAGACACAAG | 49 | 229 |
| 750568 | 358746^{#} | 358765^{#} | AGGAAGGGCCTGAGCTTCAG | 34 | 230 |
| 750569 | 363914 | 363933 | CTCACCACACCTCAGTGCAG | 93 | 231 |
| | 384545 | 384564 | | | |
| 750570 | 364549^{#} | 364568^{#} | CTTTCCTGCCTGGACCACCA | 68 | 232 |
| 750571 | 366064 | 366083 | TTGGGCACCCTCCAGATGCC | 63 | 233 |
| | 373449 | 373468 | | | |
| 750572 | 366247 | 366266 | CACTCACCTATGCTGGTCAA | 72 | 234 |
| | 370104 | 370123 | | | |
| | 386794 | 386813 | | | |
| 750573 | 366487 | 366506 | TCAGCTGGGTGCTGCCCTGC | 117 | 235 |
| | 407918 | 407937 | | | |
| 750574 | 366668 | 366687 | CCATTCAGGGCCATGGGTTT | 67 | 236 |
| | 374053 | 374072 | | | |
| 750575 | 391964 | 391983 | TCCCTGCACATGCATCCAGC | 97 | 237 |
| | 393859 | 393878 | | | |
| | 403520 | 403539 | | | |
| 750576 | 395822 | 395841 | ACTCCAGGGACCAAGAGCTC | 49 | 238 |
| | 420812 | 420831 | | | |
| 750577 | 397780 | 397799 | GAGACCCACTGAGATGGCCC | 26 | 239 |
| | 415262 | 415281 | | | |
| 750578 | 402885 | 402904 | ACCCCATGACCCTGGAGGTG | 63 | 240 |
| | 410060 | 410079 | | | |
| 750579 | 403932 | 403951 | ATGACCCCAGCAGGATGCAC | 57 | 241 |
| | 424209 | 424228 | | | |
| 750580 | 422678 | 422697 | TCACCCACCACTGTCCAGAG | 95 | 242 |
| | 426410 | 426429 | | | |
| 750581 | 422778 | 422797 | GTACCACTGAGATGGCCCAT | 68 | 243 |
| | 426510 | 426529 | | | |
| 750582 | 423273 | 423292 | AATGCAGACCTGGCAGTCGC | 50 | 244 |
| | 430180 | 430199 | | | |

TABLE 4b
SEQ ID NO: 1 start sites for modified oligonucleotides complementary to repeat regions

| | # of comp. | | SEQ |
|---|---|---|---|
| Compound | sites within | | ID |
| Number | SEQ ID NO: 1 | SEQ ID NO: 1 start sites | NO: |
| 705110 | 20 | 229870, 232603, 235253, 237932, 240726, 243420, 246181, 248825, 251500, | 173 |
| | | 258532, 259677, 261158, 261978, 263775, 264917, 266052, 267194, 268313, | |
| | | 270176, 272427 | |
| 705112 | 16 | 232607, 237936, 243424, 252518, 254323, 258536, 259681, 261162, 261982, | 174 |
| | | 263779, 264921, 266056, 267198, 268317, 270180, 272431 | |
| 750517 | 21 | 229869, 232602, 235252, 237931, 240725, 243419, 246180, 248824, 251499, | 179 |
| | | 257447, 258531, 259676, 261157, 261977, 263774, 264916, 266051, 267193, | |
| | | 268312, 270175, 272426 | |
| 750518 | 16 | 232608, 237937, 243425, 252519, 254324, 258537, 259682, 261163, 261983, | 180 |
| | | 263780, 264922, 266057, 267199, 268318, 270181, 272432 | |
| 750519 | 20 | 349103, 353307, 357118, 364011, 367794, 369796, 371701, 377828, 379703, | 181 |
| | | 381607, 382737, 384642, 388298, 393921, 396997, 401626, 414465, 420126, | |
| | | 421994, 423858, 427578 | |
| 750520 | 30 | 349105, 353309, 355214, 357120, 358879, 364013, 365917, 367796, 369798, | 182 |
| | | 371703, 373302, 375957, 377830, 379705, 381609, 382739, 384644, 386464, | |
| | | 388300, 393923, 396999, 400729, 401628, 410769, 414467, 420128, 421996, | |
| | | 423860, 425727, 427580 | |
| 750521 | 33 | 349107, 351019, 353311, 355216, 357122, 358881, 364015, 365919, 367798, | 183 |
| | | 369800, 371705, 373304, 375959, 377832, 379707, 381611, 382741, 384646, | |
| | | 386466, 388302, 390180, 393925, 397001, 400731, 401630, 410771, 412631, | |
| | | 414469, 420130, 421998, 423862, 425729, 427582 | |
| 750522 | 33 | 349109, 351021, 353313, 355218, 357124, 358883, 364017, 365921, 367800, | 184 |
| | | 369802, 371707, 373306, 375961, 377834, 379709, 381613, 382743, 384648, | |
| | | 386468, 388304, 390182, 393927, 397003, 400733, 401632, 410773, 412633, | |
| | | 414471, 420132, 422000, 423864, 425731, 427584 | |
| 750523 | 31 | 349111, 351023, 353315, 355220, 357126, 358885, 364019, 365923, 367802, | 185 |
| | | 369804, 371709, 373308, 375963, 377836, 379711, 381615, 382745, 384650, | |
| | | 386470, 388306, 393929, 397005, 401634, 410775, 412635, 414473, 420134, | |
| | | 422002, 423866, 425733, 427586 | |
| 750524 | 32 | 349113, 351025, 353317, 355222, 357128, 358887, 364021, 365925, 367804, | 186 |
| | | 369806, 371711, 373310, 375965, 377838, 379713, 381617, 382747, 384652, | |
| | | 386472, 388308, 393931, 397007, 401636, 405499, 410777, 412637, 414475, | |
| | | 420136, 422004, 423868, 425735, 427588 | |
| 750525 | 30 | 349115, 351027, 353319, 355224, 357130, 358889, 364023, 365927, 367806, | 187 |
| | | 369808, 371713, 373312, 375967, 377840, 384654, 386474, 388310, 393933, | |
| | | 397009, 401638, 405501, 410779, 412639, 414477, 420138, 422006, 423870, | |
| | | 425737, 427590, 429251 | |
| 750526 | 31 | 349117, 351029, 353321, 355226, 357132, 358891, 362700, 364025, 365929, | 188 |
| | | 367808, 369810, 371715, 373314, 375969, 377842, 384656, 386476, 388312, | |
| | | 397011, 401640, 405503, 410781, 412641, 414479, 418232, 420140, 422008, | |
| | | 423872, 425739, 427592, 429253 | |
| 750527 | 31 | 349119, 351031, 355228, 357134, 358893, 362702, 364027, 365931, 367810, | 189 |
| | | 369812, 371717, 373316, 375971, 377844, 384658, 386478, 388314, 392044, | |
| | | 397013, 401642, 405505, 410783, 412643, 414481, 418234, 420142, 422010, | |
| | | 423874, 425741, 427594, 429255 | |
| 750528 | 32 | 349121, 351033, 355230, 357136, 358895, 360780, 362704, 364029, 365933, | 190 |
| | | 367812, 369814, 371719, 373318, 375973, 377846, 384660, 386480, 388316, | |
| | | 392046, 397015, 401644, 405507, 410785, 412645, 414483, 418236, 420144, | |
| | | 422012, 423876, 425743, 427596, 429257 | |
| 750529 | 32 | 349123, 351035, 355232, 357138, 358897, 362706, 364031, 365935, 367814, | 191 |
| | | 369816, 371721, 373320, 375975, 377848, 384662, 386482, 388318, 392048, | |
| | | 397017, 401646, 403603, 405509, 410787, 412647, 414485, 418238, 420146, | |
| | | 422014, 423878, 425745, 427598, 429259 | |
| 750530 | 33 | 349125, 349125, 351037, 355234, 357140, 358899, 362708, 364033, 365937, | 192 |
| | | 367816, 369818, 371723, 373322, 375977, 377850, 384664, 386484, 388320, | |
| | | 392050, 397019, 401648, 403605, 405511, 410789, 412649, 414487, 418240, | |
| | | 420148, 422016, 423880, 425747, 427600, 429261 | |
| 750531 | 32 | 349127, 351039, 355236, 357142, 358901, 362710, 364035, 365939, 367818, | 193 |
| | | 369820, 371725, 373324, 375979, 377852, 384666, 386486, 388322, 392052, | |
| | | 397021, 401650, 403607, 405513, 410791, 412651, 414489, 418242, 420150, | |
| | | 422018, 423882, 425749, 427602, 429263 | |
| 750532 | 31 | 349129, 355238, 357144, 358903, 362712, 364037, 365941, 367820, 369822, | 194 |
| | | 371727, 373326, 375981, 377854, 386488, 388324, 392054, 397023, 398903, | |
| | | 401652, 403609, 405515, 410793, 412653, 414491, 418244, 420152, 422020, | |
| | | 423884, 425751, 427604, 429265 | |
| 750533 | 28 | 349131, 355240, 357146, 358905, 362714, 364039, 365943, 367822, 369824, | 195 |
| | | 371729, 373328, 375983, 377856, 386490, 388326, 392056, 397025, 401654, | |
| | | 403611, 410795, 414493, 418246, 420154, 422022, 423886, 425753, 427606, | |
| | | 429267 | |
| 750534 | 29 | 349133, 355242, 357148, 358907, 362716, 364041, 365945, 367824, 369826, | 196 |
| | | 371731, 373330, 375985, 377858, 386492, 388328, 392058, 397027, 401656, | |
| | | 403613, 409248, 410797, 414495, 418248, 420156, 422024, 423888, 425755, | |
| | | 427608, 429269 | |
| 750535 | 29 | 349135, 355244, 357150, 358909, 362718, 364043, 365947, 367826, 369828, | 197 |
| | | 371733, 373332, 375987, 377860, 386494, 388330, 392060, 397029, 401658, | |
| | | 403615, 409250, 410799, 414497, 418250, 420158, 422026, 423890, 425757, | |
| | | 427610, 429271 | |
| 750536 | 30 | 349137, 355246, 357152, 358911, 362720, 364045, 365949, 367828, 369830, | 198 |
| | | 371735, 373334, 375989, 377862, 386496, 392062, 393955, 397031, 401660, | |
| | | 403617, 407381, 409252, 410801, 414499, 418252, 420160, 422028, 423892, | |
| | | 425759, 427612, 429273 | |
| 750537 | 30 | 349139, 355248, 357154, 358913, 360801, 362722, 364047, 365951, 367830, | 199 |
| | | 369832, 371737, 373336, 375991, 377864, 386498, 392064, 393957, 397033, | |
| | | 401662, 403619, 409254, 410803, 414501, 418254, 420162, 422030, 423894, | |
| | | 425761, 427614, 429275 | |
| 750538 | 25 | 349141, 355250, 357156, 358915, 360803, 362724, 365953, 367832, 369834, | 200 |
| | | 371739, 373338, 375993, 377866, 392066, 393959, 397035, 401664, 403621, | |
| | | 410805, 418256, 420164, 422032, 425763, 427616, 429277 | |
| 750539 | 22 | 349143, 355252, 357158, 358917, 362726, 365955, 369836, 373340, 375995, | 201 |
| | | 377868, 392068, 393961, 397037, 401666, 403623, 410807, 418258, 420166, | |
| | | 422034, 425765, 429279, 448197 | |
| 750540 | 20 | 349145, 355254, 358919, 362728, 365957, 369838, 373342, 375997, 377870, | 202 |
| | | 392070, 393963, 401668, 403625, 410809, 418260, 420168, 422036, 425767, | |
| | | 429281, 448199 | |
| 750541 | 18 | 349147, 355256, 358921, 362730, 365959, 369840, 373344, 375999, 377872, | 203 |
| | | 393965, 401670, 410811, 418262, 420170, 422038, 425769, 429283, 448201 | |
| 750542 | 17 | 349149, 351061, 355258, 358923, 362732, 365961, 369842, 373346, 376001, | 204 |
| | | 377874, 393967, 410813, 418264, 420172, 422040, 425771, 429285 | |
| 750543 | 16 | 349151, 351063, 355260, 358925, 362734, 365963, 369844, 373348, 376003, | 205 |
| | | 377876, 393969, 418266, 420174, 422042, 425773, 429287 | |
| 750544 | 15 | 349153, 351065, 355262, 358927, 362736, 365965, 369846, 373350, 376005, | 206 |
| | | 377878, 418268, 420176, 422044, 425775, 429289 | |
| 750545 | 14 | 349155, 351067, 355264, 358929, 362738, 365967, 369848, 373352, 376007, | 207 |
| | | 377880, 418270, 420178, 425777, 429291 | |
| 750546 | 13 | 349157, 351069, 355266, 358931, 362740, 365969, 369850, 373354, 376009, | 208 |
| | | 418272, 420180, 425779, 429293 | |
| 750547 | 14 | 349159, 351071, 355268, 358933, 362742, 365971, 369852, 373356, 376011, | 209 |
| | | 407403, 418274, 420182, 425781, 429295 | |
| 750548 | 17 | 349162, 351074, 355271, 358936, 362745, 365974, 369855, 373359, 376014, | 210 |
| | | 407406, 412686, 416425, 418277, 420185, 425784, 427637, 429298 | |
| 750549 | 12 | 349165, 351077, 357180, 358939, 362748, 365977, 373362, 376017, 412689, | 211 |
| | | 418280, 425787, 429301 | |
| 750550 | 9 | 349168, 351080, 357183, 358942, 365980, 373365, 376020, 412692, 425790 | 212 |
| 750551 | 11 | 349171, 351083, 357186, 358945, 365983, 373368, 376023, 381675, 405557, | 213 |
| | | 412695, 425793 | |
| 750552 | 14 | 349174, 351086, 358948, 360836, 365986, 371772, 373371, 376026, 377898, | 214 |
| | | 381678, 393992, 412698, 422065, 425796 | |
| 750553 | 10 | 349177, 351089, 358951, 371775, 377901, 381681, 384716, 412701, 422068, | 215 |
| | | 425799 | |
| 750555 | 23 | 349390, 351292, 353581, 355499, 361054, 364302, 368083, 370059, 371989, | 217 |
| | | 373589, 378120, 379994, 383026, 388586, 390466, 401917, 403871, 409508, | |
| | | 411053, 412917, 414751, 420414, 429518 | |
| 750556 | 24 | 349392, 351294, 353583, 355501, 361056, 364304, 368085, 370061, 371991, | 218 |
| | | 373591, 376253, 378122, 383028, 388588, 390468, 401919, 403873, 409510, | |
| | | 411055, 412919, 420416, 422284, 426016, 429520 | |
| 750557 | 13 | 349442, 353633, 366255, 373640, 378173, 390519, 397322, 401968, 407684, | 219 |
| | | 409560, 414803, 420466, 429569 | |
| 750558 | 7 | 349957, 359696, 374917, 376821, 383615, 389153, 411626 | 220 |
| 750559 | 12 | 350910, 358772, 365811, 373197, 375845, 403478, 407243, 410663, 423753, | 221 |
| | | 425620, 427479, 429146 | |
| 750560 | 12 | 350914, 358776, 365815, 373201, 375849, 390074, 403482, 410667, 423757, | 222 |
| | | 425624, 427483, 429150 | |
| 750561 | 10 | 350924, 358786, 360674, 365825, 375859, 390084, 401536, 409127, 425634, | 223 |
| | | 427493 | |
| 750562 | 10 | 351544, 353840, 361305, 363233, 397528, 399421, 413175, 415009, 418768, | 224 |
| | | 424402 | |
| 750563 | 20 | 353287, 357098, 358857, 363991, 365896, 367774, 369776, 379683, 381587, | 225 |
| | | 382717, 384622, 388278, 398857, 401606, 403563, 414445, 416346, 425705, | |
| | | 427558, 429219 | |
| 750564 | 20 | 353293, 357104, 360748, 363997, 367780, 369782, 379689, 381593, 382723, | 226 |
| | | 384628, 388284, 393907, 396983, 398863, 401612, 405475, 414451, 416352, | |
| | | 427564, 429225 | |
| 750565 | 17 | 353305, 357116, 364009, 367792, 369794, 379701, 381605, 382735, 384640, | 227 |
| | | 388296, 393919, 396995, 401624, 414463, 420124, 423856, 427576 | |
| 750567 | 12 | 353579, 361052, 370057, 378118, 388584, 390464, 401915, 409506, 412915, | 229 |
| | | 414749, 420412, 429516 | |
| 750568 | 11 | 358746, 362555, 365785, 369656, 375819, 381477, 382607, 386333, 390044, | 230 |
| | | 416238, 421864 | |
| 750570 | 11 | 364549, 385176, 392568, 397522, 399415, 404124, 407883, 413169, 415003, | 232 |
| | | 418762, 428112 | |

TABLE 5
Reduction of UBE3A-ATS RNA by 7,000 nM 5-10-5 MOE gapmers with mixed PO/PS
internucleoside linkages in vitro (35,000 cells/well)

| | SEQ ID | SEQ ID | | UBE3A- | |
|---|---|---|---|---|---|
| Compound | NO: 1 | NO: 1 | | ATS | SEQ ID |
| Number | Start Site | Stop Site | Sequence (5′ to 3′) | (% UTC) | NO |
| 617456 | 463905 | 463924 | CAACTGTTACCAAGACTTCA | 40 | 32 |
| 617457 | 465003 | 465022 | ATCTGCGAATAGAGGCCCTC | 30 | 33 |
| 617460 | 466539 | 466558 | TAGGTTGCATAAAGCCAGGC | 40 | 36 |
| 617461 | 466981 | 467000 | CACACATCTTGTTCCCTCAA | 41 | 37 |
| 617557 | 483977 | 483996 | ATCATGTGCATACCCAGGGT | 26 | 172 |
| 750326 | 504100 | 504119 | CTTCAACTAACAGTATCTTA | 20 | 245 |
| 750327 | 504103 | 504122 | AGTCTTCAACTAACAGTATC | 51 | 246 |
| 750328 | 504126 | 504145 | CTATTTCATTAAGTCACCCC | 53 | 247 |
| 750329 | 504179 | 504198 | GGACAGCTGTGTGGAGGGAT | 26 | 248 |
| 750330 | 504218 | 504237 | ACCACCAGGGAGACCAGCCT | 68 | 249 |
| 750331 | 504228 | 504247 | CAGCCTTTCTACCACCAGGG | 55 | 250 |
| 750332 | 504229 | 504248 | TCAGCCTTTCTACCACCAGG | 32 | 251 |
| 750333 | 504334 | 504353 | ACAGAGTGTTTACTGTGAGC | 29 | 252 |
| 750334 | 504503 | 504522 | TCCATGGAATGGCTGTCATG | 39 | 253 |
| 750335 | 504731 | 504750 | TTCCTTCAGAGTTATTTCTT | 73 | 254 |
| 750336 | 504740 | 504759 | TTATTCTCCTTCCTTCAGAG | 70 | 255 |
| 750337 | 504741 | 504760 | GTTATTCTCCTTCCTTCAGA | 41 | 256 |
| 750338 | 504817 | 504836 | GAAGTAGTCCTGCCCTTTCC | 60 | 257 |
| 750339 | 504923 | 504942 | ATATCCTTTCCTCTCCTACT | 78 | 258 |
| 750340 | 504958 | 504977 | GACTGATGGTTACCCATACA | 40 | 259 |
| 750341 | 504987 | 505006 | CATTTAACAACTATTATCTT | 27 | 260 |
| 750342 | 505003 | 505022 | TCATTAAATAGCTAACCATT | 91 | 261 |
| 750343 | 505043 | 505062 | CCACTTTGCAACTCAAGATT | 31 | 262 |
| 750344 | 505046 | 505065 | CAGCCACTTTGCAACTCAAG | 20 | 263 |
| 750345 | 505051 | 505070 | GACTCCAGCCACTTTGCAAC | 62 | 264 |
| 750346 | 505073 | 505092 | CCAGAAATTTAGTCTGTTGT | 59 | 265 |
| 750347 | 505096 | 505115 | CATAAGCTGCTGGATTTGTT | 51 | 266 |
| 750348 | 505241 | 505260 | GAAGAGAACGAGGATATAAA | 35 | 267 |
| 750349 | 505306 | 505325 | GTGATATATTAGAACTGTAT | 28 | 268 |
| 750350 | 505443 | 505462 | AGAGGATTTAGAGTTAAAAT | 22 | 269 |
| 750351 | 505569 | 505588 | ACTGAAAGGTCTGTATGTTT | 73 | 270 |
| 750352 | 505656 | 505675 | CAGGCCTAGCTTCCACCTAA | 108 | 271 |
| 750353 | 505837 | 505856 | TCTGTCAAAGACCTGTGAGG | 56 | 272 |
| 750354 | 505922 | 505941 | TCTGCTTGTGGTTCTTCCCT | 71 | 273 |
| 750355 | 505985 | 506004 | CAAATATGGAATAGCACTTG | 54 | 274 |
| 750356 | 506040 | 506059 | GTTGAGAACGGTATTGAGTA | 56 | 275 |
| 750357 | 506052 | 506071 | CTCTTGTTTTCAGTTGAGAA | 42 | 276 |
| 750358 | 506097 | 506116 | ATTTCTCCATGGACTCCAGA | 47 | 277 |
| 750359 | 506109 | 506128 | CATTGGCTTCATATTTCTCC | 11 | 278 |
| 750360 | 506306 | 506325 | TATTGCCTTCACTGCTGCCT | 9 | 279 |
| 750361 | 506518 | 506537 | ACTGACTTGCTCTGCCTACT | 71 | 280 |
| 750362 | 506617 | 506636 | GAGAAGTCTCTCATGGCACC | 40 | 281 |
| 750363 | 506731 | 506750 | GGAGTGCTCCACACTTCTGT | 27 | 282 |
| 750364 | 506776 | 506795 | CTCCAGGTTGTGGAGGTTGT | 75 | 283 |
| 750365 | 506783 | 506802 | GTATATACTCCAGGTTGTGG | 23 | 284 |
| 750366 | 506881 | 506900 | ACTTCTCATTCTCTCCACCA | 17 | 285 |
| 750367 | 507189 | 507208 | AAAGCATTTTCTACCAGAGC | 45 | 286 |
| 750368 | 507198 | 507217 | TAGACAAGGAAAGCATTTTC | 54 | 287 |
| 750369 | 507312 | 507331 | CACCTGCCCTGCTTTTGCTT | 41 | 288 |
| 750370 | 507324 | 507343 | TGGTCCTAGCTTCACCTGCC | 89 | 289 |
| 750371 | 507357 | 507376 | AGATCCAACCTGTGTGGAAA | 61 | 290 |
| 750372 | 507534 | 507553 | AGAAATTAGAGCCAGGTTCC | 36 | 291 |
| 750373 | 507635 | 507654 | TCCCCCCAGAAGGCTTGACT | 71 | 292 |
| 750374 | 507755 | 507774 | TCGCTGGCCATTTCATATAT | 44 | 293 |
| 750375 | 507978 | 507997 | AAAACATGTTAACTGTTATC | 40 | 294 |
| 750376 | 508159 | 508178 | TTAGCCATGTGCTTTGTGAC | 68 | 295 |
| 750377 | 508208 | 508227 | TCCCTTCTGTCATCTGATCT | 59 | 296 |
| 750378 | 508218 | 508237 | AAGGTAGTTCTCCCTTCTGT | 93 | 297 |
| 750379 | 508426 | 508445 | TTCCATTGCACTCCTTTCTA | 113 | 298 |
| 750380 | 508530 | 508549 | TAAAAGGAAAACCCACTTGT | 72 | 299 |
| 750381 | 508700 | 508719 | TACAGAAATTACCAGTAAAG | 38 | 300 |
| 750382 | 508710 | 508729 | TCCAGATTTCTACAGAAATT | 102 | 301 |
| 750383 | 503980 | 503999 | TCACTGCACACTGTACAGGA | 78 | 302 |
| | 508746 | 508765 | | | |
| 750384 | 508890 | 508909 | TGCCTAGTTCCCTCCTGAAA | 98 | 303 |
| 750385 | 508908 | 508927 | TTATGTTTACTTCATGACTG | 91 | 304 |
| 750386 | 508945 | 508964 | CTTCATTATTCTCTAGTGCC | 14 | 305 |
| 750387 | 509013 | 509032 | CTATTCCCCTTCAACATGTG | 44 | 306 |
| 750388 | 509060 | 509079 | CATACCCAACATGCTTGCAT | 44 | 307 |
| 750389 | 509079 | 509098 | AATGCATTACCCTACAATGC | 105 | 308 |
| 750390 | 509127 | 509146 | CTCATCACAACTGGGTGGTA | 76 | 309 |
| 750391 | 509134 | 509153 | ATCCCAGCTCATCACAACTG | 88 | 310 |
| 750392 | 509167 | 509186 | TCCAAGTGCTTCAAGCTGAG | 100 | 311 |
| 750393 | 509189 | 509208 | CACCCACAGCAGGCAGATAA | 58 | 312 |
| 750394 | 509208 | 509227 | TACCTTGCTCCAAAATAATC | 37 | 313 |
| 750395 | 509230 | 509249 | CTGTTTCTTGAGGCAAATGA | 54 | 314 |
| 750396 | 509787 | 509806 | CTTTTCTCAATGTCAACTCT | 48 | 315 |
| 750397 | 510028 | 510047 | AGAGTTATACACGGAACCCA | 71 | 316 |

TABLE 6
Reduction of UBE3A-ATS RNA by 8,000 nM 5-10-5 MOE gapmers with mixed
PO/PS internucleoside linkages in vitro (40,000 cells/well)

| | SEQ ID | SEQ ID | | | |
|---|---|---|---|---|---|
| | NO: 1 | NO: 1 | | UBE3A- | |
| Compound | Start | Stop | | ATS | SEQ ID |
| Number | Site | Site | Sequence (5′ to 3′) | (% UTC) | NO |
| 617456 | 463905 | 463924 | CAACTGTTACCAAGACTTCA | 26 | 32 |
| 617457 | 465003 | 465022 | ATCTGCGAATAGAGGCCCTC | 46 | 33 |
| 617460 | 466539 | 466558 | TAGGTTGCATAAAGCCAGGC | 8 | 36 |
| 617461 | 466981 | 467000 | CACACATCTTGTTCCCTCAA | 21 | 37 |
| 617557 | 483977 | 483996 | ATCATGTGCATACCCAGGGT | 23 | 172 |
| 749968 | 465163 | 465182 | TTCTAGGGCTCCAGTTTATG | 86 | 317 |
| 749969 | 465238 | 465257 | TGGTCATCTCGGGTATATAA | 20 | 318 |
| 749970 | 465341 | 465360 | CTTACTATCTTCAAGAATTC | 68 | 319 |
| 749971 | 465346 | 465365 | TTTTTCTTACTATCTTCAAG | 56 | 320 |
| 749972 | 465394 | 465413 | AGTCAATTGTCAGACTTATT | 37 | 321 |
| 749973 | 465587 | 465606 | AAGGAGTTCCTTTAGCATTT | 27 | 322 |
| 749974 | 465594 | 465613 | CAGACCGAAGGAGTTCCTTT | 50 | 323 |
| 749975 | 465612 | 465631 | TCCAGTGCCTTTCTATTTCA | 33 | 324 |
| 749976 | 465686 | 465705 | ACTTTGTTTTAAACTTACAC | 46 | 325 |
| 749977 | 465765 | 465784 | CATCAACACAAGTTTATAAT | 47 | 326 |
| 749978 | 465892 | 465911 | AACTCCCACAAGGTACTCTT | 32 | 327 |
| 749979 | 465906 | 465925 | ACTGTCAACTCCTGAACTCC | 54 | 328 |
| 749980 | 465956 | 465975 | CAATGAATCTATTCTTAGAT | 122 | 329 |
| 749981 | 465978 | 465997 | GTGAAACTGTTTATACCCTT | 25 | 330 |
| 749982 | 465996 | 466015 | GTTGGTGATGCAGGTAAAGT | 24 | 331 |
| 749983 | 466024 | 466043 | TTGTTACTGAGCTGTGCCAC | 48 | 332 |
| 749984 | 466119 | 466138 | AAGTGGATCTCTTGGGCAGG | 22 | 333 |
| 749985 | 466182 | 466201 | TTTACCCTCTCCCAACCACT | 51 | 334 |
| 749986 | 466217 | 466236 | GGCTGCTGTTTGAGTCCCCA | 40 | 335 |
| 749987 | 466220 | 466239 | ATGGGCTGCTGTTTGAGTCC | 58 | 336 |
| 749988 | 466221 | 466240 | TATGGGCTGCTGTTTGAGTC | 55 | 337 |
| 749989 | 466529 | 466548 | AAAGCCAGGCCAGGTGCTGA | 64 | 338 |
| 749990 | 466532 | 466551 | CATAAAGCCAGGCCAGGTGC | 30 | 339 |
| 749991 | 466534 | 466553 | TGCATAAAGCCAGGCCAGGT | 20 | 340 |
| 749992 | 466537 | 466556 | GGTTGCATAAAGCCAGGCCA | 36 | 341 |
| 749993 | 466539 | 466558 | TAGGTTGCATAAAGCCAGGC | 46 | 36 |
| 749994 | 466541 | 466560 | TCTAGGTTGCATAAAGCCAG | 52 | 342 |
| 749995 | 466544 | 466563 | TTCTCTAGGTTGCATAAAGC | 33 | 343 |
| 749996 | 466546 | 466565 | CCTTCTCTAGGTTGCATAAA | 28 | 344 |
| 749997 | 466549 | 466568 | TCACCTTCTCTAGGTTGCAT | 34 | 345 |
| 749998 | 466551 | 466570 | TATCACCTTCTCTAGGTTGC | 44 | 346 |
| 749999 | 466701 | 466720 | AAATAACTGGATCTCATAAC | 55 | 114 |
| 750000 | 466979 | 466998 | CACATCTTGTTCCCTCAAGG | 26 | 347 |
| 750001 | 466981 | 467000 | CACACATCTTGTTCCCTCAA | 26 | 37 |
| 750002 | 466983 | 467002 | TTCACACATCTTGTTCCCTC | 26 | 348 |
| 750003 | 466986 | 467005 | TGCTTCACACATCTTGTTCC | 43 | 349 |
| 750004 | 466988 | 467007 | CCTGCTTCACACATCTTGTT | 49 | 350 |
| 750005 | 466991 | 467010 | GAACCTGCTTCACACATCTT | 36 | 351 |
| 750006 | 467049 | 467068 | CTTTCATCAGTTAGTCAGGT | 23 | 352 |
| 750007 | 467200 | 467219 | GGAGTTGGTTATTGGAAAAT | 48 | 353 |
| 750008 | 467289 | 467308 | TCTATTGGTGTTCCTTTTAG | 48 | 354 |
| 750009 | 467296 | 467315 | AGAGTAGTCTATTGGTGTTC | 22 | 355 |
| 750010 | 467363 | 467382 | CTTTTAAGATAATTTTTCTC | 90 | 356 |
| 750011 | 467417 | 467436 | TACGCTCCTTCATTTCATGC | 55 | 357 |
| 750012 | 467506 | 467525 | TTTTTAATCCTCTGATGAAT | 102 | 358 |
| 750013 | 467508 | 467527 | TTTTTTTAATCCTCTGATGA | 62 | 38 |
| 750014 | 467604 | 467623 | CTCTCTTCTCCTTTATGACT | 41 | 359 |
| 750015 | 467628 | 467647 | CTTAAATAAGTTTTCTACCC | 42 | 360 |
| 750016 | 467639 | 467658 | AGCCATTATTTCTTAAATAA | 56 | 361 |
| 750017 | 467669 | 467688 | CATATCTTTTCCTAGATTTG | 110 | 362 |
| 750018 | 467813 | 467832 | AGAATCCTGTCTCCCTCTTA | 34 | 363 |
| 750019 | 467916 | 467935 | TGAGTCTCTTTTCTTTCGGT | 41 | 364 |
| 750020 | 467919 | 467938 | TGATGAGTCTCTTTTCTTTC | 35 | 365 |
| 750021 | 467921 | 467940 | TGTGATGAGTCTCTTTTCTT | 30 | 366 |
| 750022 | 467962 | 467981 | TACTGAGAAATCTCTTGAAT | 77 | 367 |
| 750023 | 468277 | 468296 | TAAAATTATTTATACACCAT | 73 | 368 |
| 750024 | 468359 | 468378 | TTTATACTGTAGTATGCATT | 53 | 369 |
| 750025 | 468410 | 468429 | TTACTTCCCTACCCTTGCAT | 75 | 370 |
| 750026 | 468413 | 468432 | CTTTTACTTCCCTACCCTTG | 67 | 371 |
| 750027 | 468464 | 468483 | ATTTATTTTAAGCTGATAAC | 52 | 372 |
| 750028 | 468733 | 468752 | AAATCCATTTGTCCAGTCTG | 14 | 373 |
| 750029 | 468888 | 468907 | TATCTGCATGCAATATCTTT | 70 | 374 |
| 750030 | 468924 | 468943 | CTGTAAGTATAGATGCCTCT | 15 | 375 |
| 750031 | 468968 | 468987 | TTAGCCTTTTGATATAGTTT | 25 | 376 |
| 750032 | 468988 | 469007 | GCTTCACCATTTTGACCTTC | 19 | 377 |
| 750033 | 469140 | 469159 | TTTTGAAAGGGAGGCACTGA | 27 | 378 |
| 750034 | 469604 | 469623 | TGAGGTGTAATGTTGTTTAT | 32 | 379 |
| 750035 | 469717 | 469736 | TAATAGTCTCTATTGTTTTT | 50 | 380 |
| 750036 | 469884 | 469903 | CAAGTTAACTAATATGTTGG | 71 | 381 |
| 750037 | 469985 | 470004 | TATTGATTCAATTCCCTTAT | 23 | 382 |
| 750038 | 469988 | 470007 | GAATATTGATTCAATTCCCT | 37 | 383 |
| 750039 | 470062 | 470081 | AATTTTTTTAAATGGTTGGC | 51 | 384 |

TABLE 7
Reduction of UBE3A-ATS RNA by 8,000 nM 5-10-5 MOE gapmers with mixed PO/PS
internucleoside linkages in vitro (40,000 cells/well)

| | SEQ ID | SEQ ID | | | |
|---|---|---|---|---|---|
| | NO: 1 | NO: 1 | | UBE3A- | |
| Compound | Start | Stop | | ATS | SEQ ID |
| Number | Site | Site | Sequence (5′ to 3′) | (% UTC) | NO |
| 617456 | 463905 | 463924 | CAACTGTTACCAAGACTTCA | 18 | 32 |
| 617457 | 465003 | 465022 | ATCTGCGAATAGAGGCCCTC | 36 | 33 |
| 617460 | 466539 | 466558 | TAGGTTGCATAAAGCCAGGC | 12 | 36 |
| 617461 | 466981 | 467000 | CACACATCTTGTTCCCTCAA | 16 | 37 |
| 617557 | 483977 | 483996 | ATCATGTGCATACCCAGGGT | 27 | 172 |
| 750182 | 488205 | 488224 | AACAGAGAATTGTATATCCA | 43 | 385 |
| 750183 | 488322 | 488341 | ACATGAGATCTTTAATAAGA | 73 | 386 |
| 750184 | 488343 | 488362 | CAAGAGAGAAGCCACTCATG | 64 | 387 |
| 750185 | 488685 | 488704 | AGCAGATTTGAGCTGGAAGA | 42 | 388 |
| 750186 | 488928 | 488947 | AACTGGCAGAAAATATCTCT | 36 | 389 |
| 750187 | 488941 | 488960 | AAAGAAGAACATAAACTGGC | 70 | 390 |
| 750188 | 489021 | 489040 | GTTGGCTCTATTTTCAAATG | 33 | 391 |
| 750189 | 489449 | 489468 | CTGTTTAGGCTGGACACTGT | 90 | 392 |
| 750190 | 489478 | 489497 | ATTCAGGAAATTAAAGCATT | 60 | 393 |
| 750191 | 489698 | 489717 | AGCAGAACAGACCTTATTTG | 41 | 394 |
| 750192 | 489712 | 489731 | CCTTCAACCAGAGGAGCAGA | 44 | 395 |
| 750193 | 489756 | 489775 | GATCTTGGTTTGTAGAAGGT | 35 | 396 |
| 750194 | 489824 | 489843 | TTCAAAATGGTAGAAAATTG | 64 | 397 |
| 750195 | 489873 | 489892 | TGAAAGGCCTACAGCAACCA | 46 | 398 |
| 750196 | 489893 | 489912 | ATGGGAGCTCTGGAAAACAG | 27 | 399 |
| 750197 | 490070 | 490089 | TTCTGAGTATATGTGAAACA | 39 | 400 |
| 750198 | 492874 | 492893 | ATAAGGAGATTAATTTAAGA | 86 | 401 |
| 750199 | 493278 | 493297 | GAATCAAAGAAAGAAGGAAT | 47 | 402 |
| 750200 | 493440 | 493459 | GCTGTAATAATAATCATATT | 41 | 403 |
| 750201 | 493678 | 493697 | AGAATTCTTCCCTACAGGTT | 51 | 404 |
| 750202 | 493831 | 493850 | CAGTAATTAATGTTCTTATA | 37 | 405 |
| 750203 | 493839 | 493858 | CCCCAATTCAGTAATTAATG | 39 | 406 |
| 750204 | 493841 | 493860 | GGCCCCAATTCAGTAATTAA | 56 | 407 |
| 750205 | 493882 | 493901 | ATGTAACCTATTCAAGATGA | 47 | 408 |
| 750206 | 493908 | 493927 | TTATTTGGAAGAAGAATCTT | 98 | 409 |
| 750207 | 494002 | 494021 | TATAAAATACTTTTTATGGG | 101 | 410 |
| 750208 | 494398 | 494417 | GACTGTGATAAAGATGTATA | 84 | 411 |
| 750209 | 494443 | 494462 | TAAGGGTCATGTACTATACA | 33 | 412 |
| 750210 | 494494 | 494513 | GTGTGTGCAATAGCCTAAAT | 27 | 413 |
| 750211 | 494554 | 494573 | CAGAAGCAAAAGATAGCAGC | 53 | 414 |
| 750212 | 494873 | 494892 | TATTAATGTACTTGAAGATG | 52 | 415 |
| 750213 | 495043 | 495062 | ATCAGTGTGTGCAGATTCTG | 45 | 416 |
| 750214 | 495050 | 495069 | TCCCATCATCAGTGTGTGCA | 27 | 417 |
| 750215 | 495201 | 495220 | TATGAAAATTAATGTTCAAG | 80 | 418 |
| 750216 | 495233 | 495252 | AAAAAATTTTAAACCCCTAG | 76 | 419 |
| 750217 | 495441 | 495460 | TCATGAAAGTAGAGAGTAAG | 68 | 420 |
| 750218 | 495659 | 495678 | TGAAACAATTTAAGTGCCCA | 64 | 421 |
| 750219 | 495718 | 495737 | TTGAAGGGATATCTTCATTC | 106 | 422 |
| 750220 | 495795 | 495814 | TCTGAAAAAAATAGAACAAC | 64 | 423 |
| 750221 | 496202 | 496221 | AATAAAAGACCTGCACAGCA | 66 | 424 |
| 750222 | 496205 | 496224 | CAAAATAAAAGACCTGCACA | 48 | 425 |
| 750223 | 496379 | 496398 | AGACCCTTATTTACACCATA | 65 | 426 |
| 750224 | 496557 | 496576 | CTATTAATGAGCTATCTGAA | 37 | 427 |
| 750225 | 496561 | 496580 | TCTACTATTAATGAGCTATC | 45 | 428 |
| 750226 | 496567 | 496586 | TTTCCATCTACTATTAATGA | 39 | 429 |
| 750227 | 496661 | 496680 | GTCTCCACCAGAACAAAACT | 69 | 430 |
| 750228 | 496691 | 496710 | ATGACATAACCATATACAAA | 35 | 431 |
| 750229 | 496697 | 496716 | TTACTGATGACATAACCATA | 71 | 432 |
| 750230 | 496869 | 496888 | CAAAATTCAACCTGGTTTCA | 39 | 433 |
| 750231 | 496927 | 496946 | ATGGAGGGTGTAAATCAAAT | 36 | 434 |
| 750232 | 497148 | 497167 | TGTTACACTGTTATTAAAGC | 28 | 435 |
| 750233 | 497197 | 497216 | AAAACAATGAAGCAGAGGGA | 37 | 436 |
| 750234 | 497299 | 497318 | TAATAAAAAGTATCCCACCA | 72 | 437 |
| 750235 | 497429 | 497448 | GAAGTTATGCACCATCAAAT | 46 | 438 |
| 750236 | 497477 | 497496 | TTTACTACTGATATCACCAA | 41 | 439 |
| 750237 | 497680 | 497699 | AGAACAGACTAAGCCCGAAA | 40 | 440 |
| 750238 | 497917 | 497936 | AATTCTGGTGGAAAATACAG | 71 | 441 |
| 750239 | 497984 | 498003 | ACAGAAATCATATCAAATCC | 69 | 442 |
| 750240 | 498096 | 498115 | ATATATGAAACATTCCATCC | 39 | 443 |
| 750241 | 498127 | 498146 | TTACACTTTAGACCAAACGG | 37 | 444 |
| 750242 | 498179 | 498198 | GGGCAGATTGATCACCTAGA | 25 | 445 |
| 750243 | 498208 | 498227 | CGGGACCTCAATACTCTACT | 37 | 446 |
| 750244 | 498432 | 498451 | TAAATGGAAATTGAGAGCAG | 61 | 447 |
| 750245 | 498842 | 498861 | AAGTCACAACCACATACTGC | 57 | 448 |
| 750246 | 498894 | 498913 | GATTCTCCAACAAAAAGACA | 50 | 449 |
| 750247 | 498942 | 498961 | GACACTAGCAGTTTCTTACC | 30 | 450 |
| 750248 | 499132 | 499151 | GCTTAAAGTAGCCTAAGGAT | 32 | 451 |
| 750249 | 499286 | 499305 | ACAATAAGTTGTAGCTACAA | 61 | 452 |
| 750250 | 499304 | 499323 | TTAAAAACAACTGTAGCTAC | 62 | 453 |
| 750251 | 499335 | 499354 | TTCCTATTAGGAGGTTTAAA | 43 | 454 |
| 750252 | 499395 | 499414 | ATAAGTAATTCATAGTCAGA | 44 | 455 |
| 750253 | 499452 | 499471 | GGCTTAAATAAAAGACTGCT | 63 | 456 |

TABLE 8
Reduction of UBE3A-ATS RNA by 8,000 nM 5-10-5 MOE gapmers with mixed
PO/PS internucleoside linkages in vitro (35,000 cells/well)

| | SEQ ID | SEQ ID | | | |
|---|---|---|---|---|---|
| | NO: 1 | NO: 1 | | UBE3A- | |
| Compound | Start | Stop | | ATS | SEQ ID |
| Number | Site | Site | Sequence (5′ to 3′) | (% UTC) | NO |
| 617456 | 463905 | 463924 | CAACTGTTACCAAGACTTCA | 34 | 32 |
| 617457 | 465003 | 465022 | ATCTGCGAATAGAGGCCCTC | 44 | 33 |
| 617460 | 466539 | 466558 | TAGGTTGCATAAAGCCAGGC | 45 | 36 |
| 617461 | 466981 | 467000 | CACACATCTTGTTCCCTCAA | 19 | 37 |
| 617557 | 483977 | 483996 | ATCATGTGCATACCCAGGGT | 37 | 172 |
| 749753 | 448285 | 448304 | TAAGATTCCATTGCCAGAAT | 115 | 457 |
| 749754 | 448296 | 448315 | AAGTTTCGCAATAAGATTCC | 103 | 458 |
| 749755 | 448500 | 448519 | TTTCAGTCAGCAAAGGCAGC | 80 | 459 |
| 749756 | 448681 | 448700 | TCTCAACCCTGAAAACAATC | 87 | 460 |
| 749757 | 448989 | 449008 | CATTGGCATTATTCACAGCA | 103 | 461 |
| 749758 | 449031 | 449050 | CTGACTGTCATTCATATAAG | 69 | 462 |
| 749759 | 449067 | 449086 | TGCATAACGATAATCATGTG | 161 | 463 |
| 749760 | 449112 | 449131 | TTGTAGATCCTGGCAAGTAT | 132 | 464 |
| 749761 | 449130 | 449149 | AAAAATAAAGTTTCCCTCTT | 64 | 465 |
| 749762 | 449167 | 449186 | CAAAACTTGTCAACATTATA | 129 | 466 |
| 749763 | 449218 | 449237 | CTATATTTAGACCAAATGAG | 91 | 467 |
| 749764 | 449254 | 449273 | CTGACATATATAAATTAGAA | 104 | 468 |
| 749765 | 449263 | 449282 | CATAGCAACCTGACATATAT | 109 | 469 |
| 749766 | 449279 | 449298 | ACAAACATTGTAAAAACATA | 92 | 470 |
| 749767 | 449337 | 449356 | TTAGAACATGTAGCCATAAT | 69 | 471 |
| 749768 | 449382 | 449401 | AATTGTATTTAATTTAATGA | 102 | 472 |
| 749769 | 449439 | 449458 | ATCATACTGGAGCCAGGTGA | 85 | 473 |
| 749770 | 449545 | 449564 | AATGCAGAAATAAGACCTTC | 88 | 474 |
| 749771 | 449765 | 449784 | CAGTCATCCTTATCTAAGGG | 63 | 475 |
| 749772 | 449786 | 449805 | AAGCCAAAGAGTACTCTTCC | 83 | 476 |
| 749773 | 449820 | 449839 | GATATCTGGGTGTGTCAGCT | 67 | 477 |
| 749774 | 449944 | 449963 | CAACATAAGGTCTTATTGTT | 74 | 478 |
| 749775 | 450083 | 450102 | GGTCTTCTAGAAGCTAATAG | 77 | 479 |
| 749776 | 450092 | 450111 | TTGATAAGTGGTCTTCTAGA | 64 | 480 |
| 749777 | 450204 | 450223 | CAATTCTTTTGAGTGTGTAC | 66 | 481 |
| 749778 | 450205 | 450224 | TCAATTCTTTTGAGTGTGTA | 70 | 482 |
| 749779 | 450511 | 450530 | GTGTGACATTGTCATCATAC | 87 | 483 |
| 749780 | 450710 | 450729 | CTTTATGCTTTCTGTTCTTT | 76 | 484 |
| 749781 | 450733 | 450752 | GAGACTCTCTTTGTTTCTTT | 96 | 485 |
| 749782 | 450906 | 450925 | TTCATTGGAATTCATTGAGC | 94 | 486 |
| 749783 | 450978 | 450997 | CAAGACTTTCTTCTTGTTTT | 115 | 487 |
| 749784 | 451042 | 451061 | AGTCAGCTGTTAATCTTCCT | 85 | 488 |
| 749785 | 451104 | 451123 | TTTTTCTTTGAGCATTTTTA | 104 | 489 |
| 749786 | 451250 | 451269 | TTTAAGTATTTAGAGAACTC | 122 | 490 |
| 749787 | 451286 | 451305 | TACCTAGGCTCACTTGCTTT | 91 | 491 |
| 749788 | 451306 | 451325 | TAGTTGTTGATTTGAATAAC | 87 | 492 |
| 749789 | 451308 | 451327 | TGTAGTTGTTGATTTGAATA | 93 | 493 |
| 749790 | 451389 | 451408 | TTATTTTAAAATCACTTCAG | 96 | 494 |
| 749791 | 451466 | 451485 | TCTTCTTTGGCAAATATATT | 126 | 495 |
| 749792 | 451604 | 451623 | TCCCTTTTTGCCATCTTTTG | 58 | 496 |
| 749793 | 451673 | 451692 | AATAAGTTTCTAATTTACAC | 113 | 497 |
| 749794 | 451834 | 451853 | TCTCATGTGTTTTTGTTCCT | 49 | 498 |
| 749795 | 451954 | 451973 | TAAACCTGGAGATTTTATCC | 128 | 499 |
| 749796 | 452167 | 452186 | GGGAACACACCATTCAGCAG | 38 | 500 |
| 749797 | 452222 | 452241 | AATCTTGTTGACTAAAAGTA | 114 | 501 |
| 749798 | 452255 | 452274 | GTCTCACGCTGTGTGAATCA | 104 | 502 |
| 749799 | 452257 | 452276 | AGGTCTCACGCTGTGTGAAT | 89 | 503 |
| 749800 | 452285 | 452304 | TGCTCCTATTTCAATATGAG | 100 | 504 |
| 749801 | 452324 | 452343 | ATAAGGTTCAAAAGCCGGTG | 182 | 505 |
| 749802 | 452459 | 452478 | AACTGGTAACATAAATGCAG | 99 | 506 |
| 749803 | 452485 | 452504 | TCAGAGCAAAATGGACTGAC | 142 | 507 |
| 749804 | 452517 | 452536 | TACAAATACCCAGTCTGCAG | 65 | 508 |
| 749805 | 452590 | 452609 | AAGGCCCTTATCATATGCCA | 96 | 509 |
| 749806 | 452661 | 452680 | TCCTATAAAAGAAGATATTT | 65 | 510 |
| 749807 | 452715 | 452734 | CTGTGAGAGCTCTGCCCTCA | 93 | 511 |
| 749808 | 453217 | 453236 | GTTAATAGTGTTCTTACATC | 106 | 512 |
| 749809 | 453233 | 453252 | CAGTGGAGTCAAGTTGGTTA | 135 | 513 |
| 749810 | 453350 | 453369 | TCTACTAGCTAACTTTATCA | 109 | 514 |
| 749811 | 453453 | 453472 | AGGATCAAAGCAGAAATTAA | 102 | 515 |
| 749812 | 453814 | 453833 | AAAAACATAGACTTTACTAA | 139 | 516 |
| 749813 | 453899 | 453918 | CACAAAAAACTGATTATATA | 92 | 517 |
| 749814 | 453933 | 453952 | GATCTGTGTTGTTCTTAAGT | 73 | 518 |
| 749815 | 453978 | 453997 | AAGGTAGATTTTATGGCTAC | 68 | 519 |
| 749816 | 454002 | 454021 | GGGCAAAAATAGCAACATAA | 47 | 520 |
| 749817 | 454067 | 454086 | AAGACATAGATGATCCCATA | 89 | 521 |
| 749818 | 454085 | 454104 | TATGAGATGTAAGGAGACAA | 86 | 522 |
| 749819 | 454303 | 454322 | GATAGGAGTAATCTTTTTTT | 86 | 523 |
| 749820 | 454611 | 454630 | AAACAAAAACTCTCCTAAGT | 77 | 524 |
| 749821 | 454657 | 454676 | AGAACTAACAGAATTAAGAG | 89 | 525 |
| 749822 | 454658 | 454677 | CAGAACTAACAGAATTAAGA | 111 | 526 |
| 749823 | 454661 | 454680 | ACACAGAACTAACAGAATTA | 71 | 527 |
| 749824 | 454759 | 454778 | AAAAAGAGGAAAACCGAAAG | 88 | 528 |

TABLE 9
Reduction of UBE3A-ATS RNA by 8,000 nM 5-10-5 MOE gapmers with a mixed
PO/PS internucleoside linkages in vitro (35,000 cells/well)

| | SEQ ID | SEQ ID | | | |
|---|---|---|---|---|---|
| | NO: 1 | NO: 1 | | UBE3A- | |
| Compound | Start | Stop | | ATS | SEQ ID |
| Number | Site | Site | Sequence (5′ to 3′) | (% UTC) | NO |
| 617456 | 463905 | 463924 | CAACTGTTACCAAGACTTCA | 40 | 32 |
| 617457 | 465003 | 465022 | ATCTGCGAATAGAGGCCCTC | 49 | 33 |
| 617460 | 466539 | 466558 | TAGGTTGCATAAAGCCAGGC | 28 | 36 |
| 617461 | 466981 | 467000 | CACACATCTTGTTCCCTCAA | 33 | 37 |
| 617557 | 483977 | 483996 | ATCATGTGCATACCCAGGGT | 42 | 172 |
| 749825 | 454828 | 454847 | CATACAAATGTCACTAATAT | 114 | 529 |
| 749826 | 454836 | 454855 | AAGACTAGCATACAAATGTC | 85 | 530 |
| 749827 | 454864 | 454883 | ACAGGTGTATATTCCCTATC | 84 | 531 |
| 749828 | 454998 | 455017 | ATATATCTACTGAATATGAT | 108 | 532 |
| 749829 | 455062 | 455081 | CTCAGAACCCTTTGGTCTAA | 66 | 533 |
| 749830 | 455110 | 455129 | CTGACTTGACTTTAATGAAA | 68 | 534 |
| 749831 | 455148 | 455167 | GCATTCAGCTTATAGCAGAA | 58 | 535 |
| 749832 | 455150 | 455169 | CTGCATTCAGCTTATAGCAG | 84 | 536 |
| 749833 | 455193 | 455212 | AAACATTCCTCATACCACAC | 73 | 537 |
| 749834 | 455230 | 455249 | CTTATCCTTGATCCAGACAA | 78 | 538 |
| 749835 | 455436 | 455455 | AATGGGAAATGCTAAAGTTG | 72 | 539 |
| 749836 | 455459 | 455478 | AGTGACACAGTAGTTGTATC | 70 | 540 |
| 749837 | 455485 | 455504 | CAATTTCCTCTCTACCAAGC | 71 | 541 |
| 749838 | 455542 | 455561 | CTTTGTCATTTCATTTATAA | 70 | 542 |
| 749839 | 455603 | 455622 | ATACAGGCATCTCAGCCCTC | 61 | 543 |
| 749840 | 455767 | 455786 | AAAGTACCAAAGTGGCTGCT | 71 | 544 |
| 749841 | 455768 | 455787 | AAAAGTACCAAAGTGGCTGC | 68 | 545 |
| 749842 | 455829 | 455848 | GAAATAATGAACTCACAGTC | 70 | 546 |
| 749843 | 455960 | 455979 | CACAGTTGTTTAGGTCATCT | 119 | 547 |
| 749844 | 457070 | 457089 | GCATGCCATATTTCCTTCTT | 91 | 548 |
| 749845 | 457076 | 457095 | ATAGAGGCATGCCATATTTC | 86 | 549 |
| 749846 | 457151 | 457170 | AGCAAAAATAATCTTAGAAA | 91 | 550 |
| 749847 | 457194 | 457213 | GATTCCAGGCCTTCTATCTC | 80 | 551 |
| 749848 | 457354 | 457373 | GGTCTCAATGAGGAAAAGGA | 34 | 552 |
| 749849 | 457424 | 457443 | ATAAAAGCAAAAGAGAGTTA | 84 | 553 |
| 749850 | 457556 | 457575 | TCTATTCTGAAACCCCAATA | 45 | 554 |
| 749851 | 457705 | 457724 | GACATGCCATCAAGAGAAGA | 59 | 555 |
| 749852 | 457917 | 457936 | ATGTATTAACCAATATTTTG | 51 | 556 |
| 749853 | 457993 | 458012 | AGAACCCACTTGATCTATTA | 53 | 557 |
| 749854 | 458199 | 458218 | TAAAGAATTGAGTACCAAAA | 64 | 558 |
| 749855 | 458268 | 458287 | TATCACATTAATTCCCTCTC | 37 | 559 |
| 749856 | 458289 | 458308 | TAGAATAGAAAAGCATGAAG | 71 | 560 |
| 749857 | 458328 | 458347 | AACAACTATATTTGCTTGTA | 39 | 561 |
| 749858 | 458346 | 458365 | ATAATCACACTAAATCTTAA | 70 | 562 |
| 749859 | 458391 | 458410 | CCTCTATTAAGATCTATGAG | 75 | 563 |
| 749860 | 458438 | 458457 | ACTTCATCAATATTTCCCCA | 31 | 564 |
| 749861 | 458537 | 458556 | GCACTTAAATTTATCAGTTG | 28 | 565 |
| 749862 | 458539 | 458558 | AAGCACTTAAATTTATCAGT | 36 | 566 |
| 749863 | 458567 | 458586 | TTAGTATGTCGAGAACTCAA | 24 | 567 |
| 749864 | 458588 | 458607 | AAGTTGAAACACATTTTAGC | 32 | 568 |
| 749865 | 458596 | 458615 | AGGATTAAAAGTTGAAACAC | 30 | 569 |
| 749866 | 458597 | 458616 | CAGGATTAAAAGTTGAAACA | 49 | 570 |
| 749867 | 458608 | 458627 | AATCAGGGAAGCAGGATTAA | 55 | 571 |
| 749868 | 458668 | 458687 | TGATTACTCTTGGCAGTAAT | 58 | 572 |
| 749869 | 458823 | 458842 | TGATAGATACTTGTATTAGC | 14 | 573 |
| 749870 | 458896 | 458915 | CAAATCTAAAGCTCATTTAC | 72 | 574 |
| 749871 | 458908 | 458927 | CTACCAAAATGTCAAATCTA | 56 | 575 |
| 749872 | 459220 | 459239 | GTAACCTGAATATTTCATGA | 37 | 576 |
| 749873 | 459228 | 459247 | AAATAATGGTAACCTGAATA | 56 | 577 |
| 749874 | 459240 | 459259 | AATACATTACTGAAATAATG | 86 | 578 |
| 749875 | 459256 | 459275 | TTTACCTTGACATTCTAATA | 40 | 579 |
| 749876 | 459450 | 459469 | TTAACCTATTTTAATAATAT | 89 | 580 |
| 749877 | 459567 | 459586 | TTAAGTGATTGGAAATAAAA | 82 | 581 |
| 749878 | 459580 | 459599 | CAATTAGGAATATTTAAGTG | 97 | 582 |
| 749879 | 459633 | 459652 | CCAGGCAATGGCTCTTTCAA | 66 | 583 |
| 749880 | 459645 | 459664 | TGTATAGTTTACCCAGGCAA | 37 | 584 |
| 749881 | 460066 | 460085 | CTTTATCAATCTAATCAATT | 65 | 585 |
| 749882 | 460115 | 460134 | ACTTTATAGTGTGGATGGTA | 22 | 586 |
| 749883 | 460146 | 460165 | TTTTAGGGAATTGTCCTGAT | 39 | 587 |
| 749884 | 460211 | 460230 | AAGGAAACACACATAATACC | 46 | 588 |
| 749885 | 460213 | 460232 | GGAAGGAAACACACATAATA | 26 | 589 |
| 749886 | 460272 | 460291 | CACTAAGGACAAAGATATGG | 75 | 590 |
| 749887 | 460303 | 460322 | TATTTGTTCATTCTCAAGAA | 56 | 591 |
| 749888 | 460545 | 460564 | CAACCTGGGCTCTCATCTAA | 41 | 592 |
| 749889 | 460709 | 460728 | AATGCTTGATCTGTGGGCTC | 32* | 593 |
| 749890 | 460749 | 460768 | ATTGTGTACACAGGGATTTG | 22* | 594 |
| 749891 | 460792 | 460811 | AACTGTATACTTTGAAAGTA | 68 | 595 |
| 749892 | 460870 | 460889 | GAAGCAAGTAAGTAAATAAT | 81 | 596 |
| 749893 | 460981 | 461000 | CTTAGATGTGTTTATCCAAA | 25 | 597 |
| 749894 | 460999 | 461018 | GTGTTTTTCCATTTTTCTCT | 9 | 598 |
| 749895 | 461027 | 461046 | TGGCTCTATCAAGGCTTCCC | 39 | 599 |
| 749896 | 461039 | 461058 | AATCCTATATTTTGGCTCTA | 34 | 600 |

TABLE 10
Reduction of UBE3A-ATS RNA by 10,000 nM 5-10-5 MOE gapmers with mixed
PO/PS internucleoside linkages in vitro (40,000 cells/well)

| | SEQ ID | SEQ ID | | | |
|---|---|---|---|---|---|
| | NO: 1 | NO: 1 | | UBE3A- | |
| Compound | Start | Stop | | ATS | SEQ ID |
| Number | Site | Site | Sequence (5′ to 3′) | (% UTC) | NO |
| 617456 | 463905 | 463924 | CAACTGTTACCAAGACTTCA | 47 | 32 |
| 617457 | 465003 | 465022 | ATCTGCGAATAGAGGCCCTC | 70 | 33 |
| 617460 | 466539 | 466558 | TAGGTTGCATAAAGCCAGGC | 51 | 36 |
| 617461 | 466981 | 467000 | CACACATCTTGTTCCCTCAA | 45 | 37 |
| 617557 | 483977 | 483996 | ATCATGTGCATACCCAGGGT | 29 | 172 |
| 699780 | 479654 | 479673 | AGTAAGGTCTGTTATTCTCC | 122 | 127 |
| 750040 | 470321 | 470340 | GAACTATCCTGCATCCGAGG | 41 | 601 |
| 750041 | 470398 | 470417 | CAACCATCGAGATGATCATA | 70 | 602 |
| 750042 | 471812 | 471831 | TAAATGCTTTTCTAAATCTA | 100 | 603 |
| 750043 | 471892 | 471911 | GCTTTTATAGTGTTGAGGCA | 81 | 604 |
| 750044 | 472153 | 472172 | TTAAGCTCTAATTAAAACAG | 113 | 605 |
| 750045 | 473241 | 473260 | TATTTCACTGGAGCTTTGAT | 107 | 606 |
| 750046 | 473564 | 473583 | AATCATCTACTGATGAACAC | 99 | 607 |
| 750047 | 473573 | 473592 | TCTTTATCTAATCATCTACT | 90 | 608 |
| 750048 | 473576 | 473595 | TTCTCTTTATCTAATCATCT | 111 | 609 |
| 750049 | 473697 | 473716 | AGTTCCTGGAAACCGCCATT | 63 | 610 |
| 750050 | 473789 | 473808 | ATGCTGTTGTACACTAGATC | 82 | 611 |
| 750051 | 473955 | 473974 | GTACACTATTGTTTTGATAT | 44 | 612 |
| 750052 | 474053 | 474072 | CACCCCTAATTTATATTACT | 56 | 613 |
| 750053 | 474069 | 474088 | CATAGGTCAATTCCTTCACC | 47 | 614 |
| 750054 | 474103 | 474122 | TTAATTTAAATAGTTTACAA | 100 | 615 |
| 750055 | 474123 | 474142 | CTAGCTTGAATGGATACCAA | 71 | 616 |
| 750056 | 474169 | 474188 | TAGTGGTTGCCTTAGTATTA | 52 | 617 |
| 750057 | 474198 | 474217 | CAAGTGCTATATTTTTTTAA | 95 | 618 |
| 750058 | 474230 | 474249 | TATATATAATTGAGGGCCAC | 116 | 619 |
| 750059 | 474414 | 474433 | ATAATTATAAGATAGGGTTT | 127 | 620 |
| 750060 | 474618 | 474637 | ATTAGTATTGCTGCTCTAGC | 91 | 621 |
| 750061 | 474786 | 474805 | CCAACTGTAATCATTGATTT | 79 | 622 |
| 750062 | 474865 | 474884 | GATAATGTGTAGTTTTTTAT | 82 | 623 |
| 750063 | 474878 | 474897 | TAAGGTGTTGTATGATAATG | 78 | 624 |
| 750064 | 474953 | 474972 | AATATGTGTCATCCTGAAGA | 93 | 625 |
| 750065 | 475066 | 475085 | TCATTGTGAATTTCCCACAT | 81 | 626 |
| 750066 | 475233 | 475252 | TTAGGGATATACTGTTATAC | 72 | 627 |
| 750067 | 475268 | 475287 | AAAATTAGGTTATTGGATTG | 103 | 628 |
| 750068 | 475293 | 475312 | CTTTCACTCTCATTTCTTAA | 91 | 629 |
| 750069 | 475397 | 475416 | ACTTTCAAGTTTATTAATTT | 115 | 630 |
| 750070 | 475495 | 475514 | TACTTTCATTTATGTCTAGT | 78 | 631 |
| 750071 | 475503 | 475522 | GATATCTATACTTTCATTTA | 125 | 632 |
| 750072 | 475628 | 475647 | CATGTTTTTACACCAGCTGT | 87 | 633 |
| 750073 | 475693 | 475712 | TTACTTACTCAATTTCTTCT | 97 | 634 |
| 750074 | 476072 | 476091 | GTTTCAGCAGTTTCTGCTCC | 85 | 635 |
| 750075 | 476164 | 476183 | GGGCACTTAGGAGTTCCTAA | 80 | 636 |
| 750076 | 476337 | 476356 | CTCTGAGAGTGTTTAGAAAT | 55 | 637 |
| 750077 | 476350 | 476369 | GTGAAAGAAAATGCTCTGAG | 62 | 638 |
| 750078 | 476405 | 476424 | TACATCAGACAAGGCTCAGG | 91 | 639 |
| 750079 | 476845 | 476864 | TTCTATAATCTTATGGTTAA | 77 | 640 |
| 750080 | 476851 | 476870 | GAAGTGTTCTATAATCTTAT | 74 | 641 |
| 750081 | 477296 | 477315 | GTGAAAATTTTGTAGGTTGC | 110 | 642 |
| 750082 | 478347 | 478366 | TACAATCAGTGTCTTTCACC | 78 | 643 |
| 750083 | 478472 | 478491 | ATGGTTAGGGCTATGTTATG | 96 | 644 |
| 750084 | 478542 | 478561 | GAAATAAAACGCAATGTATC | 118 | 645 |
| 750085 | 478710 | 478729 | CTTGCATGTTGCCTTTTTCT | 129 | 646 |
| 750086 | 479037 | 479056 | AACTCTCTGCCATTATTACT | 81 | 647 |
| 750087 | 479330 | 479349 | TAATCTCACTGGATACAGAA | 107 | 648 |
| 750088 | 479468 | 479487 | AAACATTTTACCATTTTATA | 133 | 649 |
| 750089 | 479644 | 479663 | GTTATTCTCCCTCTTGAACC | 82 | 650 |
| 750090 | 479647 | 479666 | TCTGTTATTCTCCCTCTTGA | 86 | 651 |
| 750091 | 479649 | 479668 | GGTCTGTTATTCTCCCTCTT | 51 | 652 |
| 750092 | 479652 | 479671 | TAAGGTCTGTTATTCTCCCT | 52 | 653 |
| 750093 | 479656 | 479675 | AAAGTAAGGTCTGTTATTCT | 92 | 654 |
| 750094 | 479659 | 479678 | CTAAAAGTAAGGTCTGTTAT | 74 | 655 |
| 750095 | 479661 | 479680 | GACTAAAAGTAAGGTCTGTT | 70 | 656 |
| 750096 | 479664 | 479683 | AATGACTAAAAGTAAGGTCT | 133 | 657 |
| 750097 | 480219 | 480238 | AAAGATATAGAACTGAAAAG | 128 | 658 |
| 750098 | 480286 | 480305 | GTTGGAGACTTCAATTTCCT | 89 | 659 |
| 750099 | 480361 | 480380 | AAACAACAGAGCCTCAAATA | 114 | 660 |
| 750100 | 480441 | 480460 | AAAATACCACAAAGATAGGC | 38 | 661 |
| 750101 | 480530 | 480549 | AAGAATGGAAAAGATGTATC | 57 | 662 |
| 750102 | 480533 | 480552 | TAAAAGAATGGAAAAGATGT | 99 | 663 |
| 750103 | 480648 | 480667 | AATTTTACCTCAGTATAAAA | 106 | 664 |
| 750104 | 480698 | 480717 | ATTACCAAATGCCACTGTAT | 59 | 665 |
| 750105 | 480714 | 480733 | GTTGCATAACATGTGTATTA | 65 | 666 |
| 750106 | 480787 | 480806 | AATTAACTGCTTAATGAGTA | 145 | 667 |
| 750107 | 480898 | 480917 | ATAAAGGTCACTTATTGTAT | 89 | 668 |
| 750108 | 480968 | 480987 | AATAAAACTGATACATACTA | 101 | 669 |
| 750109 | 481010 | 481029 | AATCAACTTTTAGCTATACA | 119 | 670 |
| 750110 | 481027 | 481046 | TATCATTATGACCTAGGAAT | 69 | 671 |

TABLE 11
Reduction of UBE3A-ATS RNA by 8,000 nM 5-10-5 MOE gapmers with mixed
PO/PS internucleoside linkages in vitro (40,000 cells/well)

| | SEQ ID | SEQ ID | | | |
|---|---|---|---|---|---|
| | NO: 1 | NO: 1 | | UBE3A- | |
| Compound | Start | Stop | | ATS | SEQ ID |
| Number | Site | Site | Sequence (5′ to 3′) | (% UTC) | NO |
| 617456 | 463905 | 463924 | CAACTGTTACCAAGACTTCA | 16 | 32 |
| 617457 | 465003 | 465022 | ATCTGCGAATAGAGGCCCTC | 21 | 33 |
| 617460 | 466539 | 466558 | TAGGTTGCATAAAGCCAGGC | 24 | 36 |
| 617461 | 466981 | 467000 | CACACATCTTGTTCCCTCAA | 15 | 37 |
| 617557 | 483977 | 483996 | ATCATGTGCATACCCAGGGT | 12 | 172 |
| 750254 | 499480 | 499499 | ACTGGAATTACTAAAAGGGA | 62 | 672 |
| 750255 | 499621 | 499640 | AGTAGAGAGTGGGATGGTAT | 53 | 673 |
| 750256 | 499691 | 499710 | TAAGAAACATCACATTCAAG | 67 | 674 |
| 750257 | 500139 | 500158 | TGAACAGAATGAGAAGTTTA | 82 | 675 |
| 750258 | 500141 | 500160 | TCTGAACAGAATGAGAAGTT | 69 | 676 |
| 750259 | 500285 | 500304 | TGGTGTACATTGGATATGAA | 24 | 677 |
| 750260 | 500319 | 500338 | TTTCTAACATTTACTGTGGA | 83 | 678 |
| 750261 | 500367 | 500386 | TTCTAACATACTAATTAGCA | 41 | 679 |
| 750262 | 500384 | 500403 | CACCAATGCAAGCCAGCTTC | 28 | 680 |
| 750263 | 500526 | 500545 | TGTTTAGAGGTCAAGCCCTG | 75 | 681 |
| 750264 | 500570 | 500589 | ATCAGTCAAAACATGTTCTG | 56 | 682 |
| 750265 | 500629 | 500648 | TATTACACAAGGTATTGGTA | 35 | 683 |
| 750266 | 500639 | 500658 | ATGAAAGGTTTATTACACAA | 34 | 684 |
| 750267 | 500760 | 500779 | AATCAATTTGTGCCACAGGC | 34 | 685 |
| 750268 | 500786 | 500805 | GCAGCTTATAAAGAGAGCCA | 78 | 686 |
| 750269 | 500860 | 500879 | TTTGGTAGGTAACTACGGGT | 35 | 687 |
| 750270 | 500882 | 500901 | TCGGATATAGCTTTTACATA | 14 | 688 |
| 750271 | 501004 | 501023 | AAACTAAGCACATCCGATAG | 60 | 689 |
| 750272 | 501060 | 501079 | ATCATCTTTGATTTGACTTT | 37 | 690 |
| 750273 | 501091 | 501110 | TTCTTTATGAATCTTTGAAA | 51 | 691 |
| 750274 | 501151 | 501170 | GTAAAGAGCCACCTAAGGGA | 40 | 692 |
| 750275 | 501165 | 501184 | ATGAGATGGGCACAGTAAAG | 33 | 693 |
| 750276 | 501391 | 501410 | TCCCCAGATAATGCATAGAT | 49 | 694 |
| 750277 | 501437 | 501456 | GGTGGCATAGAAGGCAGCAC | 74 | 695 |
| 750278 | 501549 | 501568 | GGATGCAGCAGGAGAAGAAA | 42 | 696 |
| 750279 | 501576 | 501595 | AAGGCAAGGCTAAGGAGTGC | 27 | 697 |
| 750280 | 501679 | 501698 | AGAGAGCTAGAGCTAGGACT | 17 | 698 |
| 750281 | 501694 | 501713 | ATCCCAAAGTTACACAGAGA | 58 | 699 |
| 750282 | 501703 | 501722 | CTTTGGGACATCCCAAAGTT | 73 | 75 |
| 750283 | 501752 | 501771 | CACCTGTATCCAAAATTCAA | 47 | 700 |
| 750284 | 501788 | 501807 | CATATCTGAAGCACAGAGAG | 39 | 701 |
| 750285 | 501860 | 501879 | CAGTCTGCTCTGCTGCTCTG | 66 | 702 |
| 750286 | 501862 | 501881 | TCCAGTCTGCTCTGCTGCTC | 67 | 703 |
| 750287 | 501882 | 501901 | AGCTCAGAGGCAGCAGGAGC | 47 | 704 |
| 750288 | 502030 | 502049 | CTAAGCTCCATATTTAAATC | 69 | 705 |
| 750289 | 502049 | 502068 | TTCAGGCTTCCTTCACAGCC | 69 | 706 |
| 750290 | 502052 | 502071 | TTCTTCAGGCTTCCTTCACA | 44 | 707 |
| 750291 | 502138 | 502157 | GGAATCAGTGCTACCCATTA | 23 | 708 |
| 750292 | 502194 | 502213 | TTAGCCATCATTTTATTCTC | 12 | 709 |
| 750293 | 502341 | 502360 | GGCCCATTTTTTCAATCTCA | 43 | 710 |
| 750294 | 502404 | 502423 | CATGGTCTTCCTTGACTACA | 40 | 711 |
| 750295 | 502580 | 502599 | AAGCCAATGCGCAAGAAAAG | 42 | 712 |
| 750296 | 503121 | 503140 | CATCCAGTTAATCTCTGACA | 31 | 713 |
| 750297 | 503125 | 503144 | CTCGCATCCAGTTAATCTCT | 38 | 714 |
| 750298 | 503145 | 503164 | ACACCATCCCAGAAATGGTC | 75 | 715 |
| 750299 | 503180 | 503199 | TTTCTGACTCCCTATCCAGT | 44 | 716 |
| 750300 | 503376 | 503395 | TTCCCCAGGGTCATAGGAGT | 71 | 717 |
| 750301 | 503442 | 503461 | GCACTGTCCCAGTTGGATTA | 27 | 718 |
| 750302 | 503490 | 503509 | ACCCAGCAAAATGTGGGTCT | 119 | 719 |
| 750303 | 503504 | 503523 | TTGGTTGTGGTGAAACCCAG | 79 | 720 |
| 750304 | 503533 | 503552 | TGTTAAAAGAGAAAAGAATC | 77 | 721 |
| 750305 | 503550 | 503569 | TTGCAGTGATGTACTGATGT | 26 | 722 |
| 750306 | 503599 | 503618 | TTGTTTTTATAAGCAATTAG | 59 | 723 |
| 750307 | 503645 | 503664 | TATAAATATGCCCATATGCT | 28 | 724 |
| 750308 | 503656 | 503675 | CTGCCTGCAACTATAAATAT | 45 | 725 |
| 750309 | 503825 | 503844 | GTATCTCCTAGCCCAGTGCC | 32 | 726 |
| 750310 | 503828 | 503847 | ACTGTATCTCCTAGCCCAGT | 64 | 727 |
| 750311 | 503895 | 503914 | GATTGCTTTATTGCAACTAA | 63 | 728 |
| 750312 | 503936 | 503955 | CTTAAATAGTAGGAAAGCCA | 14 | 729 |
| 750313 | 503973 | 503992 | ACACTGTACAGGAGGGTGTC | 25 | 155 |
| | 508739 | 508758 | | | |
| 750314 | 503975 | 503994 | GCACACTGTACAGGAGGGTG | 30 | 730 |
| | 508741 | 508760 | | | |
| 750315 | 503977 | 503996 | CTGCACACTGTACAGGAGGG | 17 | 79 |
| | 508743 | 508762 | | | |
| 750316 | 503979 | 503998 | CACTGCACACTGTACAGGAG | 41 | 731 |
| | 508745 | 508764 | | | |
| 750317 | 503981 | 504000 | TTCACTGCACACTGTACAGG | 33 | 156 |
| | 508747 | 508766 | | | |
| 750318 | 503983 | 504002 | GATTCACTGCACACTGTACA | 34 | 732 |
| | 508749 | 508768 | | | |
| 750319 | 503985 | 504004 | TTGATTCACTGCACACTGTA | 19 | 80 |
| | 508751 | 508770 | | | |
| 750320 | 503987 | 504006 | TGTTGATTCACTGCACACTG | 28 | 733 |
| | 508753 | 508772 | | | |
| 750321 | 503991 | 504010 | ATGATGTTGATTCACTGCAC | 19 | 734 |
| | 508757 | 508776 | | | |
| 750322 | 503993 | 504012 | AAATGATGTTGATTCACTGC | 43 | 157 |
| | 508759 | 508778 | | | |
| 750323 | 503995 | 504014 | GGAAATGATGTTGATTCACT | 29 | 735 |
| | 508761 | 508780 | | | |
| 750324 | 503998 | 504017 | TGTGGAAATGATGTTGATTC | 50 | 736 |
| 750325 | 504090 | 504109 | CAGTATCTTAACTGGTGAAC | 15 | 737 |

TABLE 12
Reduction of UBE3A-ATS RNA by 8,000 nM 5-10-5 MOE gapmers with mixed
PO/PS intemucleoside linkages in vitro (40,000 cells/well)

| | SEQ ID | SEQ ID | | | |
|---|---|---|---|---|---|
| | NO: 1 | NO: 1 | | UBE3A- | |
| Compound | Start | Stop | | ATS | SEQ ID |
| Number | Site | Site | Sequence (5′ to 3′) | (% UTC) | NO |
| 617456 | 463905 | 463924 | CAACTGTTACCAAGACTTCA | 25 | 32 |
| 617457 | 465003 | 465022 | ATCTGCGAATAGAGGCCCTC | 27 | 33 |
| 617460 | 466539 | 466558 | TAGGTTGCATAAAGCCAGGC | 25 | 36 |
| 617461 | 466981 | 467000 | CACACATCTTGTTCCCTCAA | 17 | 37 |
| 617557 | 483977 | 483996 | ATCATGTGCATACCCAGGGT | 13 | 172 |
| 699781 | 483977 | 483996 | ATCATGTGCATACCCAGGGT | 20 | 172 |
| 750111 | 481036 | 481055 | ACATAGAATTATCATTATGA | 49 | 738 |
| 750112 | 481073 | 481092 | ACTGTGGAAAAACTTTGGCA | 38 | 129 |
| 750113 | 481398 | 481417 | ATGGGTTAAAATACTTATAA | 79 | 739 |
| 750114 | 481451 | 481470 | TAAAACCTTTGTGCATAATG | 32 | 740 |
| 750115 | 481487 | 481506 | CAACAACAAAAGCGGATAAA | 50 | 741 |
| 750116 | 481524 | 481543 | ATGACACTAGGTTTTGCAAA | 34 | 742 |
| 750117 | 481529 | 481548 | ACCTCATGACACTAGGTTTT | 26 | 743 |
| 750118 | 481571 | 481590 | GTATAGACCCAAACTATAAA | 35 | 744 |
| 750119 | 481573 | 481592 | ATGTATAGACCCAAACTATA | 55 | 745 |
| 750120 | 481725 | 481744 | TGATCTCTTCAACAAATTGT | 82 | 746 |
| 750121 | 482139 | 482158 | AATGTTGCCGAAAGAAAAGA | 73 | 747 |
| 750122 | 482156 | 482175 | ACAAGTGTCATATACTAAAT | 51 | 748 |
| 750123 | 482174 | 482193 | AAATTTAACCAAGGAGTTAC | 48 | 749 |
| 750124 | 482246 | 482265 | AGCCATCTAAAAGAGAAATT | 38 | 750 |
| 750125 | 482396 | 482415 | GATCAAGAAGTAAAATTATC | 74 | 751 |
| 750126 | 482685 | 482704 | CACATGATAATCTCAATTAT | 52 | 752 |
| 750127 | 482916 | 482935 | GAAAAATTCACTCTATAGGT | 58 | 753 |
| 750128 | 482988 | 483007 | CTATAGAGAGATAGATATTA | 52 | 754 |
| 750129 | 483017 | 483036 | AGAAAAATGTCTTTCCAAAT | 43 | 755 |
| 750130 | 483089 | 483108 | CAAATACTTAAATCAACTGT | 50 | 756 |
| 750131 | 483255 | 483274 | GGAGGGAGGAAAATTATTTC | 14 | 757 |
| 750132 | 483297 | 483316 | AGCAAACAACAGCAACATGC | 56 | 758 |
| 750133 | 483323 | 483342 | AAAATACTTTAGAAAAGTCA | 73 | 759 |
| 750134 | 483365 | 483384 | CAGAATTCAATGGACCCACA | 33 | 760 |
| 750135 | 483809 | 483828 | TCGGCAAAGGCATTATTATT | 32 | 761 |
| 750136 | 483920 | 483939 | GCTTTCACCTATAGGTGGCC | 45 | 762 |
| 750137 | 483928 | 483947 | GATGTTAAGCTTTCACCTAT | 25 | 763 |
| 750138 | 483967 | 483986 | TACCCAGGGTAGGATTCATG | 17 | 764 |
| 750139 | 483970 | 483989 | GCATACCCAGGGTAGGATTC | 13 | 765 |
| 750140 | 483972 | 483991 | GTGCATACCCAGGGTAGGAT | 9 | 766 |
| 750141 | 483975 | 483994 | CATGTGCATACCCAGGGTAG | 16 | 767 |
| 750142 | 483979 | 483998 | AGATCATGTGCATACCCAGG | 34 | 768 |
| 750143 | 483982 | 484001 | AGAAGATCATGTGCATACCC | 36 | 769 |
| 750144 | 483984 | 484003 | TAAGAAGATCATGTGCATAC | 44 | 770 |
| 750145 | 483987 | 484006 | AATTAAGAAGATCATGTGCA | 119 | 771 |
| 750146 | 484085 | 484104 | GTTCAGATGAACAATAAGCA | 45 | 772 |
| 750147 | 484311 | 484330 | ACTCATGCTGGTTACTAGGG | 30 | 773 |
| 750148 | 484598 | 484617 | TCATATGGGTGGTCGCTAAT | 24 | 774 |
| 750149 | 484719 | 484738 | ACACTAACGATGAACTCTAA | 55 | 775 |
| 750150 | 484721 | 484740 | TAACACTAACGATGAACTCT | 42 | 776 |
| 750151 | 485136 | 485155 | TTAAAACTCAACCCAGTGCA | 29 | 777 |
| 750152 | 485344 | 485363 | ATTCCTAGAGAAAACCTAGG | 82 | 778 |
| 750153 | 485478 | 485497 | AGAACAATGTTTCTTATGAA | 72 | 779 |
| 750154 | 485865 | 485884 | GAAACTGGGATATTACCAAT | 45 | 780 |
| 750155 | 485871 | 485890 | AAAATGGAAACTGGGATATT | 37 | 781 |
| 750156 | 486052 | 486071 | AAAAATTAAAGGCCAACAGA | 46 | 782 |
| 750157 | 486157 | 486176 | TTATGGCAGGTAGTGAAAGG | 47 | 783 |
| 750158 | 486265 | 486284 | ACAATATGCAAAAATTAAAT | 74 | 784 |
| 750159 | 486400 | 486419 | CATTCTCCAACATAGATCCT | 41 | 785 |
| 750160 | 486568 | 486587 | CAATAATAGAGACTTTACCA | 79 | 786 |
| 750161 | 486812 | 486831 | ATATATTATGTAAATGTAAC | 78 | 787 |
| 750162 | 486824 | 486843 | AGGATGGAAAAGATATATTA | 76 | 788 |
| 750163 | 486842 | 486861 | AAACAGGTTGAAAATGAAAG | 79 | 789 |
| 750164 | 487049 | 487068 | AAAGGCAATATTGAAGGAAA | 72 | 790 |
| 750165 | 487267 | 487286 | GAATTGAGTTAATAATTCCT | 57 | 791 |
| 750166 | 487304 | 487323 | TCTCACAGAGAAAGAGGTGG | 21 | 792 |
| 750167 | 487314 | 487333 | TTTTCTATAATCTCACAGAG | 43 | 793 |
| 750168 | 487341 | 487360 | GGCTCAGAAAACATCCTTTT | 35 | 794 |
| 750169 | 487437 | 487456 | ATTTAATTTACACTTAATTA | 93 | 795 |
| 750170 | 487464 | 487483 | ACTTTCCTCTGCTTATAACT | 22 | 796 |
| 750171 | 487469 | 487488 | ACTATACTTTCCTCTGCTTA | 28 | 797 |
| 750172 | 487589 | 487608 | AGCAATTAGAAATCACATGA | 21 | 798 |
| 750173 | 487724 | 487743 | AAAGCAGTAAACAATAAGTG | 53 | 799 |
| 750174 | 487739 | 487758 | TCATATGTAAATCCAAAAGC | 57 | 800 |
| 750175 | 487772 | 487791 | CATTGTAAGGATAAGAGATA | 27 | 801 |
| 750176 | 487784 | 487803 | CAGTTTGAATTACATTGTAA | 29 | 802 |
| 750177 | 487804 | 487823 | AATTGAACTTAAATTGGCAT | 32 | 803 |
| 750178 | 487831 | 487850 | CTGCATAGGAGTAGAGTTTT | 31 | 804 |
| 750179 | 487877 | 487896 | AAGATGGAATTTGCGACATC | 50 | 805 |
| 750180 | 487921 | 487940 | ACATAAAAATGTATAAATCC | 70 | 806 |
| 750181 | 488018 | 488037 | ACTGATAAAGGTAAGCACAT | 31 | 807 |

TABLE 13
Reduction of UBE3A-ATS RNA by 8,000 nM 5-10-5 MOE gapmers with mixed
PO/PS internucleoside linkages in vitro (40,000 cells/well)

| | SEQ ID | SEQ ID | | | |
|---|---|---|---|---|---|
| | NO: 1 | NO: 1 | | UBE3A- | |
| Compound | Start | Stop | | ATS | SEQ ID |
| Number | Site | Site | Sequence (5′ to 3′) | (% UTC) | NO |
| 617456 | 463905 | 463924 | CAACTGTTACCAAGACTTCA | 13 | 32 |
| 617457 | 465003 | 465022 | ATCTGCGAATAGAGGCCCTC | 38 | 33 |
| 617460 | 466539 | 466558 | TAGGTTGCATAAAGCCAGGC | 16 | 36 |
| 617461 | 466981 | 467000 | CACACATCTTGTTCCCTCAA | 11 | 37 |
| 617557 | 483977 | 483996 | ATCATGTGCATACCCAGGGT | 13 | 172 |
| 750398 | 510078 | 510097 | CAGAGAGGAGAGAAGGACAA | 45 | 808 |
| 750399 | 510104 | 510123 | GGCTAGGAAAATTCTCCTGG | 39 | 809 |
| 750400 | 510207 | 510226 | AGGGAGAGCTGTCCTAAGGC | 27 | 810 |
| 750401 | 510214 | 510233 | GATATCCAGGGAGAGCTGTC | 23 | 811 |
| 750402 | 510269 | 510288 | TTGAAGGGAAAATTATTAAT | 43 | 812 |
| 750403 | 510319 | 510338 | AGCTGGACGGACAGTGTTGC | 47 | 813 |
| 750404 | 510407 | 510426 | CAAGACATGCTAGGGACTCT | 38 | 814 |
| 750405 | 510408 | 510427 | CCAAGACATGCTAGGGACTC | 30 | 815 |
| 750406 | 510416 | 510435 | GCCACAGTCCAAGACATGCT | 49 | 816 |
| 750407 | 510442 | 510461 | GCAGATAATCTGAAGATAGA | 43 | 817 |
| 750408 | 510515 | 510534 | TTTATTACAAACTGAAAGAG | 42 | 818 |
| 750409 | 510609 | 510628 | GGTCAGATAATGAGGGCCTT | 20 | 819 |
| 750410 | 510701 | 510720 | AGGATAGGTGTATGTGAGTG | 31 | 820 |
| 750411 | 510729 | 510748 | ATGAAGGTCAAGCCGAATCT | 50 | 821 |
| 750412 | 510798 | 510817 | AAAAGAAGTATGTGAAAGTA | 45 | 822 |
| 750413 | 510997 | 511016 | TGTCTCTAATCCTATTCCAA | 12 | 823 |
| 750414 | 511100 | 511119 | AGTCTTCATGATTTGGTAAA | 37 | 824 |
| 750415 | 511341 | 511360 | AGTAAGAGGCAGAATTATGT | 54 | 825 |
| 750416 | 511441 | 511460 | GGGCAGCAACAGCTCTTGAA | 16 | 826 |
| 750417 | 511503 | 511522 | TAATAATTAACAGTGACTGG | 24 | 827 |
| 750418 | 511529 | 511548 | AAGTCATTCCCCACCCTGGC | ND | 828 |
| 750419 | 511555 | 511574 | TCCAGCAGGGTGTATTCCAG | 47 | 829 |
| 750420 | 511567 | 511586 | TCAGCTGTGGTTTCCAGCAG | 34 | 830 |
| 750421 | 511579 | 511598 | GCTTAGAGAATCTCAGCTGT | 49 | 831 |
| 750422 | 511594 | 511613 | GGTTGGAAGCTGCCAGCTTA | 22 | 832 |
| 750423 | 511668 | 511687 | AATGGACTGCCGGCCTGGAG | 47 | 833 |
| 750424 | 511893 | 511912 | TGAACTACTTGGAGACCTTC | 55 | 834 |
| 750425 | 511895 | 511914 | AGTGAACTACTTGGAGACCT | 45 | 835 |
| 750426 | 512282 | 512301 | TCTTTTATTAAACCTAGTTT | 60 | 836 |
| 750427 | 512318 | 512337 | TTAGCTAGCTGTGGGTTTGC | 25 | 837 |
| 750428 | 512392 | 512411 | ACAAGAGCAGACATCTTTTT | 60 | 838 |
| 750429 | 512564 | 512583 | TGTAGCTTTTCTAAAATTCT | 34 | 839 |
| 750430 | 512570 | 512589 | GTATATTGTAGCTTTTCTAA | 16 | 840 |
| 750431 | 513010 | 513029 | CTTGATGGCTGTAGCTTGGT | 21 | 841 |
| 750432 | 513074 | 513093 | TTTCTGGATTCTCAGTCTTA | 28 | 842 |
| 750433 | 513189 | 513208 | TGCATTGGTATCTGTATATC | 23 | 843 |
| 750434 | 513219 | 513238 | GTTTCCTATTTCATCCATTT | 25 | 844 |
| 750435 | 513378 | 513397 | CTGGAGTGTAAGTAAATTCA | 33 | 845 |
| 750436 | 513442 | 513461 | ATACTCTTTCCACATTTCAG | 19 | 846 |
| 750437 | 513450 | 513469 | TCCTCTTGATACTCTTTCCA | 34 | 847 |
| 750438 | 513459 | 513478 | CTTAGGGTCTCCTCTTGATA | 32 | 848 |
| 750439 | 513467 | 513486 | CAGAGTGTCTTAGGGTCTCC | 27 | 849 |
| 750440 | 513620 | 513639 | ATATTTCTCAAATACTCTTC | 48 | 850 |
| 750441 | 513760 | 513779 | TGTGCTAGAACACTATCTTG | 62 | 851 |
| 750442 | 513793 | 513812 | TGACTCTCATCTCCCTCTTC | 70 | 852 |
| 750443 | 513796 | 513815 | CCCTGACTCTCATCTCCCTC | 50 | 853 |
| 750444 | 513875 | 513894 | CCTTCCTTCTTTATACTGCC | 46 | 854 |
| 750445 | 513944 | 513963 | CATCAAAATCTCTCATTCCT | 22 | 855 |
| 750446 | 513947 | 513966 | AATCATCAAAATCTCTCATT | 35 | 856 |
| 750447 | 513951 | 513970 | CCCCAATCATCAAAATCTCT | 70 | 857 |
| 750448 | 514039 | 514058 | TAGTCAGTAGTCCTAAAAAC | 58 | 858 |
| 750449 | 514073 | 514092 | AGACCTCTGTCTCTGGGATT | 54 | 859 |
| 750450 | 514159 | 514178 | AAAGTCCTTACCTGTTCTTG | 36 | 860 |
| 750451 | 514326 | 514345 | TTCACCGAAAGTACAGTCTT | 54 | 861 |
| 750452 | 514330 | 514349 | TAGTTTCACCGAAAGTACAG | ND | 862 |
| 750453 | 514439 | 514458 | AAGTCTTTTCTCCCCTCCCC | 28 | 863 |
| 750454 | 514504 | 514523 | TCAACAGTGTTAGTGTGTAA | 45 | 864 |
| 750455 | 514513 | 514532 | CCTTTTACCTCAACAGTGTT | 35 | 865 |
| 750456 | 514673 | 514692 | AGACTAGTCCCTGTGTAGTC | 27 | 866 |
| 750457 | 514676 | 514695 | CCAAGACTAGTCCCTGTGTA | 40 | 867 |
| 750458 | 514701 | 514720 | AACTGTCAGAGGAAGAAATG | 62 | 868 |
| 750459 | 514861 | 514880 | CGAACAGAACTTGCCGATGT | 37 | 869 |
| 750460 | 514920 | 514939 | TTGTATAGGGAGATGATAGA | 39 | 870 |
| 750461 | 515069 | 515088 | TAACCTTTTATTATTATAGA | 55 | 871 |
| 750462 | 515111 | 515130 | TAAACTAAAGTAACTGGTTT | 55 | 872 |
| 750463 | 515143 | 515162 | CCAGGAAGCTCTGGAGGGAA | 23 | 873 |
| 750464 | 515187 | 515206 | ACTCTATTATATATTTTGGT | 28 | 874 |
| 750465 | 515215 | 515234 | GTTATAAAAGTACTTTTTTT | 78 | 875 |
| 750466 | 515242 | 515261 | GGATACTTCCTCTACCCCAA | 30 | 876 |
| 750467 | 515247 | 515266 | ACAGTGGATACTTCCTCTAC | 40 | 877 |
| 750468 | 515318 | 515337 | CTGCCTTTTCATTACTATTT | 30 | 878 |
| 750469 | 515500 | 515519 | GTTTTAAAGTGGTAATTGAA | 44 | 879 |

TABLE 14
Reduction of UBE3A-ATS RNA by 7,000 nM 5-10-5 MOE gapmers with mixed
PO/PS internucleoside linkages in vitro (37,000 cells/well)

| | SEQ ID | SEQ ID | | | |
|---|---|---|---|---|---|
| | NO: 1 | NO: 1 | | UBE3A- | |
| Compound | Start | Stop | | ATS | SEQ ID |
| Number | Site | Site | Sequence (5′ to 3′) | (% UTC) | NO |
| 617557 | 483977 | 483996 | ATCATGTGCATACCCAGGGT | 44 | 172 |
| 699781 | 483977 | 483996 | ATCATGTGCATACCCAGGGT | 51 | 172 |
| 749882 | 460115 | 460134 | ACTTTATAGTGTGGATGGTA | 39 | 586 |
| 750519 | 349103* | 349122* | GTCATCACCTCTCTTCAGGA | 17 | 181 |
| 1065269 | 432253 | 432272 | TCATCATCAACCTAACCGAG | 92 | 880 |
| 1065285 | 433960 | 433979 | CCATCTTGGAACCGGATGAC | 65 | 881 |
| 1065301 | 442413 | 442432 | GTAATTGAGGTGGCCATATC | 101 | 882 |
| 1065317 | 443132 | 443151 | GAGTCCTAAATGTCTCATAC | 81 | 883 |
| 1065333 | 444649 | 444668 | GGTTTTAGTCCACTGGTTCA | 44 | 884 |
| 1065349 | 445540 | 445559 | CTAGTCATGTATCTACAGCC | 88 | 885 |
| 1065365 | 446609 | 446628 | GTATATGGCTTACACAGGCT | 82 | 886 |
| 1065381 | 447599 | 447618 | GAGATTTCAGACTACCTGTA | 64 | 887 |
| 1065397 | 448125 | 448144 | ATTGACCCAGCCCATGGCAC | 97 | 888 |
| 1065413 | 448713 | 448732 | GCGCATTGAGCAAAATTCCA | 73 | 889 |
| 1065429 | 449066 | 449085 | GCATAACGATAATCATGTGG | 116 | 890 |
| 1065445 | 449627 | 449646 | GGCTATAGGCCATTTATTCA | 111 | 891 |
| 1065461 | 451295 | 451314 | TTGAATAACTACCTAGGCTC | 86 | 892 |
| 1065477 | 452310 | 452329 | CCGGTGCAGGAATCCAGGAT | 98 | 893 |
| 1065493 | 453797 | 453816 | TAACAATAAGATAAAGGCGC | 123 | 894 |
| 1065509 | 454580 | 454599 | GGCAAGCAAAGACTACACCG | 55 | 895 |
| 1065525 | 455169 | 455188 | GCTCCTAACATTGTATCCCC | 94 | 896 |
| 1065541 | 455476 | 455495 | CTCTACCAAGCTATCCAAGT | 78 | 897 |
| 1065557 | 456768 | 456787 | GTCCTATTGGAGGGCCGCAC | 39 | 898 |
| 1065573 | 457320 | 457339 | GTCCTCCAATAAGCTTCTGA | 48 | 899 |
| 1065589 | 458165 | 458184 | GGGACAATACTGCAATCCTT | 63 | 900 |
| 1065605 | 458957 | 458976 | AGAGACCTCAAGACCTATAG | 15 | 901 |
| 1065621 | 460348 | 460367 | GACTACTTCAACCTGATACC | 30 | 902 |
| 1065637 | 460957 | 460976 | GGGCATCATTAACATAAGCT | 69 | 903 |
| 1065652 | 461602 | 461621 | ACAAACGGGCTATGTGAGAT | 50 | 904 |
| 1065667 | 463052 | 463071 | CACTGAGTTTTTGTAGTTCG | 32 | 905 |
| 1065682 | 463885 | 463904 | GGCAGTTGTGATAGTCAACA | 75 | 906 |
| 1065698 | 464994 | 465013 | TAGAGGCCCTCTTGTTTCAA | 44 | 907 |
| 1065713 | 465247 | 465266 | GGATTTTATTGGTCATCTCG | 30 | 908 |
| 1065729 | 465664 | 465683 | GTAGTTACTTATACTGGTTC | 62 | 909 |
| 1065745 | 466276 | 466295 | GTGGGTTCCTGATGGAGTCC | 79 | 910 |
| 1065761 | 466540 | 466559 | CTAGGTTGCATAAAGCCAGG | 64 | 911 |
| 1065777 | 467942 | 467961 | GCCTTAAAAGGGTTCCCTGT | 64 | 912 |
| 1065793 | 470287 | 470306 | GGTCATGATGTATGCCATTA | 39 | 913 |
| 1065809 | 474125 | 474144 | ATCTAGCTTGAATGGATACC | 55 | 914 |
| 1065825 | 475454 | 475473 | GTTCTTTCTCGGTCAAACTA | 41 | 915 |
| 1065841 | 476084 | 476103 | TACGAGTTGCTGGTTTCAGC | 46 | 916 |
| 1065857 | 478470 | 478489 | GGTTAGGGCTATGTTATGTT | 31 | 917 |
| 1065873 | 480382 | 480401 | GATTCCACTTGTGTATGCAC | 33 | 918 |
| 1065889 | 482148 | 482167 | CATATACTAAATGTTGCCGA | 30 | 919 |
| 1065905 | 483368 | 483387 | ATACAGAATTCAATGGACCC | 55 | 920 |
| 1065936 | 485657 | 485676 | GCCTAGGACCAGTTGGTTCA | 48 | 921 |
| 1065952 | 487409 | 487428 | GGCTGTTGTACATTCCTAGT | 65 | 922 |
| 1065968 | 489096 | 489115 | CCCTAAGCTTAGATATACCC | 88 | 923 |
| 1065984 | 489740 | 489759 | AGGTGGGAAACCGGTTCCCA | 100 | 924 |
| 1066000 | 493977 | 493996 | GGTCGGTCCCCACCAAAGGA | 58 | 925 |
| 1066016 | 496817 | 496836 | GCCATGTACGACCCTCATCA | 76 | 926 |
| 1066032 | 498218 | 498237 | TACTATAATACGGGACCTCA | 70 | 927 |
| 1066048 | 499683 | 499702 | ATCACATTCAAGGTAGCCCC | 48 | 928 |
| 1066064 | 500605 | 500624 | TGACCAGCAATAGGCTCTGC | 37 | 929 |
| 1066080 | 500895 | 500914 | ACTGGCCTTTGGGTCGGATA | 81 | 930 |
| 1066096 | 501395 | 501414 | GGAGTCCCCAGATAATGCAT | 91 | 931 |
| 1066112 | 501767 | 501786 | GGATGGGCTAAGAGTCACCT | 74 | 932 |
| 1066128 | 502370 | 502389 | GGTATTAAGGCCCTTGGCCA | 104 | 933 |
| 1066144 | 502741 | 502760 | GGCCCGATGACACCAGCCAC | 87 | 934 |
| 1066160 | 502949 | 502968 | TAACAGTCCTGTAACCAGAC | 90 | 935 |
| 1066176 | 503331 | 503350 | CCCCCTGAGATCCATGAGGT | 125 | 936 |
| 1066192 | 503867 | 503886 | CAGTTGTGCAGTTGTTAACT | 86 | 937 |
| 1066208 | 504141 | 504160 | AACCAGATGGCTGAGCTATT | 89 | 938 |
| 1066224 | 504518 | 504537 | TTAGGCCATACCTCTTCCAT | 77 | 939 |
| 1066240 | 505065 | 505084 | TTAGTCTGTTGTGTGACTCC | 73 | 940 |
| 1066256 | 505644 | 505663 | CCACCTAAGAGCTATCCGCT | 75 | 941 |
| 1066272 | 505945 | 505964 | GGCCGACCAGCTCTGAAAGT | 120 | 942 |
| 1066288 | 506275 | 506294 | ACCAGGGTGGTATTATAAAG | 102 | 943 |
| 1066304 | 506773 | 506792 | CAGGTTGTGGAGGTTGTTCC | 96 | 944 |
| 1066320 | 507371 | 507390 | GTTGTCTGGCATGGAGATCC | 60 | 945 |
| 1066336 | 507929 | 507948 | GTTGATTGGAGGCACTGCAG | 62 | 946 |
| 1066352 | 508488 | 508507 | TGGTGAGTAAATCAATCACG | 106 | 947 |
| 1066368 | 509007 | 509026 | CCCTTCAACATGTGTTAACG | 62 | 948 |
| 1066384 | 509917 | 509936 | CGTGGCTGTACCTGCAGTGC | 49 | 949 |
| 1066400 | 510393 | 510412 | GACTCTGATTGATTCAGTGC | 93 | 950 |
| 1066416 | 510817 | 510836 | AGTACAAACCACTAAGGGTA | 114 | 951 |
| 1066432 | 511629 | 511648 | GTGCCATATAATGTTGAAGC | 71 | 952 |
| 1066448 | 511804 | 511823 | CGTGTCTGAACTGGCCTGTG | 75 | 953 |

TABLE 15
Reduction of UBE3A-ATS RNA by 7,000 nM 5-10-5 MOE gapmers with mixed PO/PS internucleoside
linkages in vitro (37,000 cells/well)

| | SEQ ID | SEQ ID | | UBE3A- | |
|---|---|---|---|---|---|
| Compound | NO: 1 | NO: 1 | | ATS | SEQ ID |
| Number | Start Site | Stop Site | Sequence (5′ to 3′) | (% UTC) | NO |
| 617557 | 483977 | 483996 | ATCATGTGCATACCCAGGGT | 28 | 172 |
| 749882 | 460115 | 460134 | ACTTTATAGTGTGGATGGTA | 25 | 586 |
| 750519 | 349103# | 349122# | GTCATCACCTCTCTTCAGGA | 17 | 181 |
| 1065270 | 432284 | 432303 | CATAACCTCTCCTCGAGACA | 96 | 954 |
| 1065286 | 434182 | 434201 | TCTGTCACGCTTCCCTTGGC | 61 | 955 |
| 1065302 | 442470 | 442489 | TCACTGGTGTGGTATCATGC | 49 | 956 |
| 1065318 | 443199 | 443218 | GATTGCATCTCTTGCAGCAC | 63 | 957 |
| 1065334 | 444722 | 444741 | CTCACCTGTGTATATGAGTC | 93 | 958 |
| 1065350 | 445583 | 445602 | ACACTGTTAGAGCCCCCACA | 71 | 959 |
| 1065366 | 446657 | 446676 | GCATAGGAATGGGACCATAG | 88 | 960 |
| 1065382 | 447672 | 447691 | GCATCATACATAGTGTATGC | 80 | 961 |
| 1065398 | 448219 | 448238 | CTTGTCTCACAATTGTTACC | 83 | 962 |
| 1065414 | 448721 | 448740 | TAACTGTAGCGCATTGAGCA | 91 | 963 |
| 1065430 | 449092 | 449111 | GCTAGTCACTCATTGAGAAG | 110 | 964 |
| 1065446 | 449633 | 449652 | TAGATAGGCTATAGGCCATT | 85 | 965 |
| 1065462 | 451694 | 451713 | GCATATATCTTAACTCACCC | 56 | 966 |
| 1065478 | 452315 | 452334 | AAAAGCCGGTGCAGGAATCC | 82 | 967 |
| 1065494 | 453918 | 453937 | TAAGTGCCCATGGCATAGTC | 65 | 968 |
| 1065510 | 454719 | 454738 | GAGTGCTGAAGAACATCCCC | 75 | 969 |
| 1065526 | 455213 | 455232 | CAAGTCTACTACCAATAAGT | 89 | 970 |
| 1065542 | 455567 | 455586 | CGTCAGCATTGCTTGATCTC | 89 | 971 |
| 1065558 | 456773 | 456792 | TATTTGTCCTATTGGAGGGC | ND | 972 |
| 1065574 | 457363 | 457382 | CATGGTGAGGGTCTCAATGA | 40 | 973 |
| 1065590 | 458238 | 458257 | GAGACATGTGCCAGTTCAAG | 19 | 974 |
| 1065606 | 458987 | 459006 | GGACACTGGCACATCTATAG | 64 | 975 |
| 1065622 | 460362 | 460381 | CTGTATAACTGATTGACTAC | 51 | 976 |
| 1065638 | 461068 | 461087 | GCTCATCTATGGATTGCATT | 49 | 977 |
| 1065653 | 461604 | 461623 | GTACAAACGGGCTATGTGAG | 30 | 978 |
| 1065668 | 463144 | 463163 | AGCTATAGGTACCTGAAGTT | 49 | 979 |
| 1065683 | 464365 | 464384 | CTTAGCTTGCCCAGAGCATA | 57 | 980 |
| 1065699 | 464999 | 465018 | GCGAATAGAGGCCCTCTTGT | 49 | 981 |
| 1065714 | 465287 | 465306 | GATGTGTATAGGTGTTGGTC | 55 | 982 |
| 1065730 | 465808 | 465827 | CCATTTTGGTGCTATAACCC | 43 | 983 |
| 1065746 | 466283 | 466302 | CTTATAGGTGGGTTCCTGAT | 40 | 984 |
| 1065762 | 466543 | 466562 | TCTCTAGGTTGCATAAAGCC | 69 | 985 |
| 1065778 | 468007 | 468026 | GCACTTGTATAGTTCATCCC | 37 | 986 |
| 1065794 | 470316 | 470335 | ATCCTGCATCCGAGGCATGA | 76 | 987 |
| 1065810 | 474167 | 474186 | GTGGTTGCCTTAGTATTACA | 24 | 988 |
| 1065826 | 475512 | 475531 | CTGTAAGGTGATATCTATAC | 28 | 989 |
| 1065842 | 476090 | 476109 | TGTTCATACGAGTTGCTGGT | 52 | 990 |
| 1065858 | 478533 | 478552 | CGCAATGTATCAGGCAACAG | 29 | 991 |
| 1065874 | 480393 | 480412 | GAGGGCACAATGATTCCACT | 65 | 992 |
| 1065890 | 482162 | 482181 | GGAGTTACAAGTGTCATATA | 37 | 993 |
| 1065906 | 483424 | 483443 | GGCTCTATGCACTTAAGGGA | 42 | 994 |
| 1065921 | 483978 | 483997 | GATCATGTGCATACCCAGGG | 35 | 995 |
| 1065937 | 485769 | 485788 | GGTCAGATTCCTAAATACGC | 26 | 996 |
| 1065953 | 487600 | 487619 | GTGTCATATGTAGCAATTAG | 25 | 997 |
| 1065969 | 489319 | 489338 | CACCTGTATAGGAGAATTGT | 100 | 998 |
| 1065985 | 489776 | 489795 | CCACTCCCGTGGCAACATGA | 85 | 999 |
| 1066001 | 493985 | 494004 | GGGTAAGAGGTCGGTCCCCA | 48 | 1000 |
| 1066017 | 496821 | 496840 | GGAGGCCATGTACGACCCTC | 80 | 1001 |
| 1066033 | 498225 | 498244 | GCTGCAATACTATAATACGG | 56 | 1002 |
| 1066049 | 499792 | 499811 | AGCTGAGGTCACCGATCAGA | 83 | 1003 |
| 1066065 | 500610 | 500629 | AACAGTGACCAGCAATAGGC | 64 | 1004 |
| 1066081 | 500898 | 500917 | CTAACTGGCCTTTGGGTCGG | 107 | 1005 |
| 1066097 | 501399 | 501418 | GGGAGGAGTCCCCAGATAAT | 24 | 1006 |
| 1066113 | 501802 | 501821 | GGCCCAAGTGATGACATATC | 50 | 1007 |
| 1066129 | 502410 | 502429 | GTAAGGCATGGTCTTCCTTG | 79 | 1008 |
| 1066145 | 502746 | 502765 | AATATGGCCCGATGACACCA | 85 | 1009 |
| 1066161 | 502956 | 502975 | GCAAGATTAACAGTCCTGTA | 53 | 1010 |
| 1066177 | 503342 | 503361 | TCAGCTCAACACCCCCTGAG | 96 | 1011 |
| 1066193 | 503872 | 503891 | AGGGTCAGTTGTGCAGTTGT | 39 | 1012 |
| 1066209 | 504260 | 504279 | GCAAGGAATCATGTGGCTCC | 70 | 1013 |
| 1066225 | 504526 | 504545 | CCAAAGATTTAGGCCATACC | 55 | 1014 |
| 1066241 | 505106 | 505125 | GTAACCTTCACATAAGCTGC | 48 | 1015 |
| 1066257 | 505654 | 505673 | GGCCTAGCTTCCACCTAAGA | 104 | 1016 |
| 1066273 | 505949 | 505968 | CGCTGGCCGACCAGCTCTGA | ND | 1017 |
| 1066289 | 506280 | 506299 | CGTCTACCAGGGTGGTATTA | 41 | 1018 |
| 1066305 | 506779 | 506798 | ATACTCCAGGTTGTGGAGGT | 84 | 1019 |
| 1066321 | 507481 | 507500 | CAAATTGGTGAATGTTCCCC | 44 | 1020 |
| 1066337 | 508000 | 508019 | TCTCATGACCACCTAATTGA | 72 | 1021 |
| 1066353 | 508571 | 508590 | CCGTGCTGCTTTCTTGAGTG | 92 | 1022 |
| 1066369 | 509052 | 509071 | ACATGCTTGCATCCAGGCCC | 53 | 1023 |
| 1066385 | 510017 | 510036 | CGGAACCCACAGTAGAGGCA | 46 | 1024 |
| 1066401 | 510398 | 510417 | CTAGGGACTCTGATTGATTC | 45 | 1025 |
| 1066417 | 510827 | 510846 | ACCAGGCATAAGTACAAACC | 62 | 1026 |
| 1066433 | 511633 | 511652 | CTGAGTGCCATATAATGTTG | 71 | 1027 |
| 1066449 | 511822 | 511841 | AAGGCTCTCAGGGTAAGACG | 42 | 1028 |

TABLE 16
Reduction of UBE3A-ATS RNA by 7,000 nM 5-10-5 MOE gapmers with mixed PO/PS internucleoside
linkages in vitro(37,000 cells/well)

| | SEQ ID | SEQ ID | | UBE3A- | |
|---|---|---|---|---|---|
| Compound | NO: 1 | NO: 1 | | ATS | SEQ ID |
| Number | Start Site | Stop Site | Sequence (5′ to 3′) | (% UTC) | NO |
| 617557 | 483977 | 483996 | ATCATGTGCATACCCAGGGT | 52 | 172 |
| 749882 | 460115 | 460134 | ACTTTATAGTGTGGATGGTA | 22 | 586 |
| 750519 | 349103^{#} | 349122^{#} | GTCATCACCTCTCTTCAGGA | 12 | 181 |
| 1065259 | 430439 | 430458 | CGTGGAACACTGACCCATCA | 73 | 1029 |
| 1065275 | 432915 | 432934 | CAGCATGTAACTCATGTTGT | 75 | 1030 |
| 1065291 | 441514 | 441533 | GTTCTAAAGTCGGTTGTGTC | 57 | 1031 |
| 1065307 | 442648 | 442667 | AGAGTAGGCCAGGTGTCAAA | 60 | 1032 |
| 1065323 | 443577 | 443596 | TACCAGTGAGTAAACTGGCC | 89 | 1033 |
| 1065339 | 444914 | 444933 | GTACTCCCCATGCACACTTG | 48 | 1034 |
| 1065355 | 445958 | 445977 | ACGGATTATCATACCCTCCC | 115 | 1035 |
| 1065371 | 446805 | 446824 | GTCTTGTAAACCCTTACCAG | 83 | 1036 |
| 1065387 | 447818 | 447837 | CCGTTACTTAAGCTGTGGTA | 88 | 1037 |
| 1065403 | 448458 | 448477 | TAGTGCCAGTAGGACTTACT | 75 | 1038 |
| 1065419 | 448827 | 448846 | GGACCCTTAAGTCATAAAGA | 78 | 1039 |
| 1065435 | 449209 | 449228 | GACCAAATGAGCATCACATC | 69 | 1040 |
| 1065451 | 449704 | 449723 | CCTGTATGTATGGCTTATGC | 73 | 1041 |
| 1065467 | 452181 | 452200 | ATCCATAGTGATCTGGGAAC | 77 | 1042 |
| 1065483 | 453133 | 453152 | ACTATAATTGGGAATGGTCA | 77 | 1043 |
| 1065499 | 454160 | 454179 | GATTTGACCCTTATGGAGAC | 104 | 1044 |
| 1065515 | 454855 | 454874 | TATTCCCTATCCAGGGTAGA | 96 | 1045 |
| 1065531 | 455296 | 455315 | TTATCCTGTTGCAATAGAAC | 81 | 1046 |
| 1065547 | 456499 | 456518 | ATTAGATTAAAATCTGGCCG | 93 | 1047 |
| 1065563 | 456886 | 456905 | GACTCATAAGACAGGATGCC | 87 | 1048 |
| 1065579 | 457738 | 457757 | CCAGCCAGGTGTCTTATATC | 18 | 1049 |
| 1065595 | 458523 | 458542 | CAGTTGTGTATTGACTAAGT | 23 | 1050 |
| 1065611 | 459549 | 459568 | AAGACTATCCTGGTATGACT | 56 | 1051 |
| 1065627 | 460624 | 460643 | TCGATGTTCTTGCTTCCCTG | 32 | 1052 |
| 1065642 | 461446 | 461465 | GGCAGCTCCTGACAAATTAG | 22 | 1053 |
| 1065658 | 461694 | 461713 | AGACCCCTCCCTTAATGTAA | 53 | 1054 |
| 1065673 | 463249 | 463268 | ACCTGGGTATTGCTGTCCAA | 41 | 1055 |
| 1065688 | 464458 | 464477 | CTCACCCTTTACTAAGGTGC | 75 | 1056 |
| 1065703 | 465140 | 465159 | CCATTGGTATGAGAGATGCT | 72 | 1057 |
| 1065719 | 465386 | 465405 | GTCAGACTTATTGAGGATGG | 27 | 1058 |
| 1065735 | 465932 | 465951 | TTACTCCTCTGGTGTGCTGA | 29 | 1059 |
| 1065751 | 466372 | 466391 | GCGCACTTGGGAGCCAGCCA | 68 | 1060 |
| 1065767 | 467076 | 467095 | TTACTGACTGGCCTTAGGAG | 38 | 1061 |
| 1065783 | 468351 | 468370 | GTAGTATGCATTGACAAGCT | 32 | 1062 |
| 1065799 | 471923 | 471942 | GAGTATATTACCTCCAGGTT | 27 | 1063 |
| 1065815 | 474614 | 474633 | GTATTGCTGCTCTAGCTCTA | 49 | 1064 |
| 1065831 | 475841 | 475860 | ACGGACCTCATACAGTGAGT | 31 | 1065 |
| 1065847 | 476213 | 476232 | GGGCTCTTGGAAGTCTAGTT | 59 | 1066 |
| 1065863 | 479124 | 479143 | ACATACTTGGTTGCAGACGC | 26 | 1067 |
| 1065879 | 480825 | 480844 | TAGGTTTGCGGATGCCAGTG | 50 | 1068 |
| 1065895 | 482771 | 482790 | TACACAGTGGGATTTGCCCC | 59 | 1069 |
| 1065911 | 483853 | 483872 | ATGGCCTGACTAGGCATTGA | 76 | 1070 |
| 1065926 | 484302 | 484321 | GGTTACTAGGGCCAGAGAAT | 42 | 1071 |
| 1065942 | 486355 | 486374 | TGTTAATAGACTGCGATTAT | 56 | 1072 |
| 1065958 | 487839 | 487858 | GGGCGGAGCTGCATAGGAGT | 51 | 1073 |
| 1065974 | 489522 | 489541 | ACAATGGACCACCTAAGACC | 96 | 1074 |
| 1065990 | 489953 | 489972 | CAACCCTTACTCTGCCAGGG | 80 | 1075 |
| 1066006 | 494491 | 494510 | TGTGCAATAGCCTAAATGCC | 82 | 1076 |
| 1066022 | 497436 | 497455 | CTACTATGAAGTTATGCACC | 69 | 1077 |
| 1066038 | 499100 | 499119 | GTTAGCCTTACAGCAAATAC | 52 | 1078 |
| 1066054 | 500359 | 500378 | TACTAATTAGCAAGCCACTG | 52 | 1079 |
| 1066070 | 500766 | 500785 | GTGTCAAATCAATTTGTGCC | 47 | 1080 |
| 1066086 | 501001 | 501020 | CTAAGCACATCCGATAGTCA | 49 | 1081 |
| 1066102 | 501563 | 501582 | GGAGTGCTCTTTGTGGATGC | 39 | 1082 |
| 1066118 | 502117 | 502136 | ACCCATGGCTCATCAGTGGG | 91 | 1083 |
| 1066134 | 502447 | 502466 | GGCAGCTCTTTGTAGGCCCA | 60 | 1084 |
| 1066150 | 502782 | 502801 | GGAGTGGGTTCCTATAAGGA | 53 | 1085 |
| 1066166 | 503100 | 503119 | GGACTAATAGGCCTTTCTAC | 61 | 1086 |
| 1066182 | 503399 | 503418 | CTACAGTACCAGGTCATTTG | 45 | 1087 |
| 1066198 | 503946 | 503965 | CACCACCAACCTTAAATAGT | 80 | 1088 |
| 1066214 | 504395 | 504414 | CCATGCCACAGATTGGCTTG | 64 | 1089 |
| 1066230 | 504654 | 504673 | CGGAGCCTTACGCTTGGCTG | 66 | 1090 |
| 1066246 | 505185 | 505204 | CAGTCTGTCTCTGTGTACCG | 46 | 1091 |
| 1066262 | 505741 | 505760 | GGTTGACAGGACATGCTGTC | 58 | 1092 |
| 1066278 | 506119 | 506138 | GTTAGCCGAGCATTGGCTTC | 84 | 1093 |
| 1066294 | 506589 | 506608 | CCCATGGTGGTGGAATGCTG | 102 | 1094 |
| 1066310 | 506992 | 507011 | TCCCGCACCATGCATTCTGA | 43 | 1095 |
| 1066326 | 507684 | 507703 | TCAGCTTCCTTCAGTGGGCG | 65 | 1096 |
| 1066342 | 508193 | 508212 | GATCTCACACATGGCACTGC | 71 | 1097 |
| 1066358 | 508691 | 508710 | TACCAGTAAAGGGTAGTATA | 49 | 1098 |
| 1066374 | 509110 | 509129 | GTAAATATACACTTGGGCCC | 73 | 1099 |
| 1066390 | 510117 | 510136 | TAGCTGAACCTGTGGCTAGG | 60 | 1100 |
| 1066406 | 510654 | 510673 | AGTGTCAGGCTGTAAGGGAT | 59 | 1101 |
| 1066422 | 510901 | 510920 | GCCATAGGTTTCAGGCTGAT | 46 | 1102 |
| 1066438 | 511707 | 511726 | GAGATGGGCTATGAGCCATC | 84 | 1103 |

TABLE 17
Reduction of UBE3A-ATS RNA by 7,000 nM 5-10-5 MOE gapmers with mixed PO/PS internucleoside
linkages in vitro (37,000 cells/well)

| | SEQ ID | SEQ ID | | UBE3A- | |
|---|---|---|---|---|---|
| Compound | NO: 1 | NO: 1 | | ATS | SEQ ID |
| Number | Start Site | Stop Site | Sequence (5′ to 3′) | (% UTC) | NO |
| 617557 | 483977 | 483996 | ATCATGTGCATACCCAGGGT | 32 | 172 |
| 749882 | 460115 | 460134 | ACTTTATAGTGTGGATGGTA | 21 | 586 |
| 750519 | 349103# | 349122# | GTCATCACCTCTCTTCAGGA | 8 | 181 |
| 1065264 | 430601 | 430620 | GGACCAGCGGGCCGAACGCA | 101 | 1104 |
| 1065280 | 433410 | 433429 | ATGCAAAGGTGTCGATTTGT | 47 | 1105 |
| 1065296 | 441815 | 441834 | GGTCCATAGATGTCAGTTAC | 27 | 1106 |
| 1065312 | 442767 | 442786 | ATTAATGTTCTATGGTGGAT | 46 | 1107 |
| 1065328 | 443839 | 443858 | GGAGTAGAATGCCCACTGGG | 53 | 1108 |
| 1065344 | 445212 | 445231 | GAGACCTGAATATACCTTAC | 55 | 1109 |
| 1065360 | 446498 | 446517 | GGTATGCCAGGTTTTTGACA | 49 | 1110 |
| 1065376 | 447152 | 447171 | CCGTGTAATGACACACCTCT | 67 | 1111 |
| 1065392 | 447922 | 447941 | AGGCTATAGTCAAAGGGTGG | 46 | 1112 |
| 1065408 | 448614 | 448633 | GTGTCAGTCAATCATTGAGA | 75 | 1113 |
| 1065424 | 449001 | 449020 | GGTCTTATTTACCATTGGCA | 63 | 1114 |
| 1065440 | 449470 | 449489 | TAACATGTTGCTTGCACTCC | 85 | 1115 |
| 1065456 | 450017 | 450036 | GCTCAAACTAGAATACCCCA | 81 | 1116 |
| 1065472 | 452261 | 452280 | GTCTAGGTCTCACGCTGTGT | 96 | 1117 |
| 1065488 | 453235 | 453254 | GACAGTGGAGTCAAGTTGGT | 106 | 1118 |
| 1065504 | 454462 | 454481 | GGACTCCACACACCTACTAG | 107 | 1119 |
| 1065520 | 455019 | 455038 | GTGGGATGGCTGTCAATGCT | 56 | 1120 |
| 1065536 | 455341 | 455360 | GATAATTGAGGAGTTCACCA | 81 | 1121 |
| 1065552 | 220313 | 220332 | GATCCAAACAAGCACCCTCC | 85 | 1122 |
| | 456682 | 456701 | | | |
| 1065568 | 457020 | 457039 | TATCACAGTTGCTTGACCCT | 70 | 1123 |
| 1065584 | 457982 | 458001 | GATCTATTATGAGGGCATCA | 39 | 1124 |
| 1065600 | 458571 | 458590 | AGCTTTAGTATGTCGAGAAC | 20 | 1125 |
| 1065616 | 460107 | 460126 | GTGTGGATGGTATCCTGGTC | 26 | 1126 |
| 1065632 | 460711 | 460730 | GGAATGCTTGATCTGTGGGC | 25* | 1127 |
| 1065647 | 461518 | 461537 | GCTAGACTAGTTGAAATCGG | 44 | 1128 |
| 1065663 | 462056 | 462075 | CCCTCCCATCAGTGAAGATT | 78 | 1129 |
| 1065677 | 463767 | 463786 | GCTTTAGAGGTCAAATAGTG | 50 | 1130 |
| 1065693 | 464784 | 464803 | CTGGTCTTCCTCGAGGATAG | 69 | 1131 |
| 1065708 | 465236 | 465255 | GTCATCTCGGGTATATAAAT | 30 | 1132 |
| 1065724 | 465561 | 465580 | GGACAAGTCTTATAGAGAAC | 52 | 1133 |
| 1065740 | 466229 | 466248 | GTTCCAAGTATGGGCTGCTG | 44 | 1134 |
| 1065756 | 466426 | 466445 | GTCAACATGTGCTTGCAAGC | 35 | 1135 |
| 1065772 | 467425 | 467444 | GCTGTTGATACGCTCCTTCA | 37 | 1136 |
| 1065788 | 469130 | 469149 | GAGGCACTGAAGTTCACTAC | 37 | 1137 |
| 1065804 | 472937 | 472956 | AGGGTCCCACTTGTTTAGGT | 44 | 1138 |
| 1065820 | 474883 | 474902 | CGTATTAAGGTGTTGTATGA | 40 | 1139 |
| 1065836 | 475943 | 475962 | CCTTGTGACAATAGTAGTGA | 54 | 1140 |
| 1065852 | 476443 | 476462 | GGCTAGATGGAGCTTGAGCC | 94 | 1141 |
| 1065868 | 479997 | 480016 | CGTGAGCTATCTGTACAAAA | 24 | 1142 |
| 1065884 | 481441 | 481460 | GTGCATAATGGTCTACCACA | 32 | 1143 |
| 1065900 | 482857 | 482876 | TGAAGATAGGTCAGTTAACG | 58 | 1144 |
| 1065916 | 483925 | 483944 | GTTAAGCTTTCACCTATAGG | 33 | 1145 |
| 1065931 | 484601 | 484620 | TGATCATATGGGTGGTCGCT | 46 | 1146 |
| 1065947 | 487134 | 487153 | ATTGTCCTCCTGGTAACCAC | 28 | 1147 |
| 1065963 | 488572 | 488591 | GGGACTGGTGCCACACCATC | 55 | 1148 |
| 1065979 | 489629 | 489648 | CTAACCTGGATCTCAGATAG | 75 | 1149 |
| 1065995 | 493844 | 493863 | CTGGGCCCCAATTCAGTAAT | 98 | 1150 |
| 1066011 | 495399 | 495418 | TTGGTAAAGGAGGGAATCGG | ND | 1151 |
| 1066027 | 498030 | 498049 | TCCAGGATATATGTTAGTCC | 46 | 1152 |
| 1066043 | 499291 | 499310 | TAGCTACAATAAGTTGTAGC | 94 | 1153 |
| 1066059 | 500494 | 500513 | GAGGGCCATGTTAAAGGCCT | 119 | 1154 |
| 1066075 | 500861 | 500880 | TTTTGGTAGGTAACTACGGG | 41 | 1155 |
| 1066091 | 501335 | 501354 | TGTAGCTCAGCTCAATGTGT | 58 | 1156 |
| 1066107 | 501628 | 501647 | GAACTGCACTGGGTTGTCTC | 58 | 1157 |
| 1066123 | 502162 | 502181 | GTATTGCACTCACATACTGT | 61 | 1158 |
| 1066139 | 502579 | 502598 | AGCCAATGCGCAAGAAAAGT | 69 | 1159 |
| 1066155 | 502824 | 502843 | CATAGGCATAAAGCCTCCTA | 79 | 1160 |
| 1066171 | 503139 | 503158 | TCCCAGAAATGGTCCTCGCA | 86 | 1161 |
| 1066187 | 503480 | 503499 | ATGTGGGTCTGCACCAAGTT | 86 | 1162 |
| 1066203 | 504077 | 504096 | GGTGAACTCCTGTGACTGAT | 52 | 1163 |
| 1066219 | 504441 | 504460 | GTGGAGTAGGTATATTAGTC | 32 | 1164 |
| 1066235 | 504825 | 504844 | GTATTCCTGAAGTAGTCCTG | 36 | 1165 |
| 1066251 | 505330 | 505349 | AGAAATTGGGCCGCCTCTGT | 58 | 1166 |
| 1066267 | 505817 | 505836 | GTGCTTAGTGAACTGTGGGC | 55 | 1167 |
| 1066283 | 506185 | 506204 | CCGGCATGCATCAGCTCTGA | 34 | 1168 |
| 1066299 | 506693 | 506712 | TAAGAAGCTTGCCTTTCGAT | 96 | 1169 |
| 1066315 | 507250 | 507269 | GCAGTGCTACTGTGCCCTTA | 58 | 1170 |
| 1066331 | 507818 | 507837 | TCCAGCCCTCAGTATATAGA | 62 | 1171 |
| 1066347 | 508285 | 508304 | CCGAAGTGGAAGTAGTCATG | 63 | 1172 |
| 1066363 | 508790 | 508809 | TGAATGCCACCGTGATTGCA | 50 | 1173 |
| 1066379 | 509416 | 509435 | CGTAGTGTCATCACCATAAA | 45 | 1174 |
| 1066395 | 510227 | 510246 | GTTGTGTCTGAGGGATATCC | 45 | 1175 |
| 1066411 | 510718 | 510737 | GCCGAATCTTGACATACAGG | 55 | 1176 |
| 1066427 | 511241 | 511260 | GATTACCAAAAAGGGACCAG | 48 | 1177 |
| 1066443 | 511766 | 511785 | CTCCTACCAATAATGGAGTC | 76 | 1178 |

TABLE 18
Reduction of UBE3A-ATS RNA by 7,000 nM 5-10-5 MOE gapmers with mixed PO/PS internucleoside
linkages in vitro (37,000 cells/well)

| | SEQ ID | SEQ ID | | UBE3A- | |
|---|---|---|---|---|---|
| Compound | NO: 1 | NO: 1 | | ATS | SEQ ID |
| Number | Start Site | Stop Site | Sequence (5′ to 3′) | (% UTC) | NO |
| 617557 | 483977 | 483996 | ATCATGTGCATACCCAGGGT | 38 | 172 |
| 749882 | 460115 | 460134 | ACTTTATAGTGTGGATGGTA | 32 | 586 |
| 750519 | 349103# | 349122# | GTCATCACCTCTCTTCAGGA | 17 | 181 |
| 1065265 | 430612 | 430631 | CGGACACACTGGGACCAGCG | 90 | 1179 |
| 1065281 | 433463 | 433482 | GCTCCTATCAAGCTTTTCCC | 46 | 1180 |
| 1065297 | 441909 | 441928 | TGAGGTGCATTTTCTAGCCC | 78 | 1181 |
| 1065313 | 442830 | 442849 | ATCTATGGAGTCATCTCCCC | 76 | 1182 |
| 1065329 | 443979 | 443998 | GGTAGAGGTTAATCTATGTC | 59 | 1183 |
| 1065345 | 445310 | 445329 | CGTCGGTAAAGGAAGCTACT | 58 | 1184 |
| 1065361 | 446510 | 446529 | TCATAAGGACAAGGTATGCC | 73 | 1185 |
| 1065377 | 447310 | 447329 | GGACCTCATTAGATCAGTCA | 90 | 1186 |
| 1065393 | 448007 | 448026 | GGCAGTTGAGTGGTGTCAGT | 99 | 1187 |
| 1065409 | 448628 | 448647 | GGATTGCATCACATGTGTCA | 55 | 1188 |
| 1065425 | 449017 | 449036 | TATAAGTGTCCATAAAGGTC | 90 | 1189 |
| 1065441 | 449475 | 449494 | GGCATTAACATGTTGCTTGC | 66 | 1190 |
| 1065457 | 450095 | 450114 | GAATTGATAAGTGGTCTTCT | 86 | 1191 |
| 1065473 | 452266 | 452285 | GGGAAGTCTAGGTCTCACGC | ND | 1192 |
| 1065489 | 453243 | 453262 | CTACATATGACAGTGGAGTC | 89 | 1193 |
| 1065505 | 454467 | 454486 | TGAGTGGACTCCACACACCT | 84 | 1194 |
| 1065521 | 455028 | 455047 | GATATTGCAGTGGGATGGCT | 60 | 1195 |
| 1065537 | 455360 | 455379 | CGTGATAGTGCTATTGTGAG | 60 | 1196 |
| 1065553 | 220317 | 220336 | CATCGATCCAAACAAGCACC | 74 | 1197 |
| | 456686 | 456705 | | | |
| 1065569 | 457233 | 457252 | GCTTAGCTACTCACCCCTGT | 70 | 1198 |
| 1065585 | 457989 | 458008 | CCCACTTGATCTATTATGAG | 64 | 1199 |
| 1065601 | 458790 | 458809 | CCCTAATATAGGGCAGATGA | 59 | 1200 |
| 1065617 | 460108 | 460127 | AGTGTGGATGGTATCCTGGT | 44 | 1201 |
| 1065633 | 460736 | 460755 | GGATTTGAGCCTGCTATGTC | 15* | 1202 |
| 1065648 | 461524 | 461543 | CATTCAGCTAGACTAGTTGA | 70 | 1203 |
| 1065664 | 462061 | 462080 | TATGGCCCTCCCATCAGTGA | 49 | 1204 |
| 1065678 | 463775 | 463794 | TAGATTGGGCTTTAGAGGTC | 33 | 1205 |
| 1065694 | 464788 | 464807 | ACATCTGGTCTTCCTCGAGG | 61 | 1206 |
| 1065709 | 465237 | 465256 | GGTCATCTCGGGTATATAAA | 17 | 1207 |
| 1065725 | 465591 | 465610 | ACCGAAGGAGTTCCTTTAGC | 40 | 1208 |
| 1065741 | 466233 | 466252 | GGCAGTTCCAAGTATGGGCT | 76 | 1209 |
| 1065757 | 466438 | 466457 | GTGGAGCCAGCTGTCAACAT | 66 | 1210 |
| 1065773 | 467718 | 467737 | TGGAATGTATCCTGTACGGG | 52 | 1211 |
| 1065789 | 469377 | 469396 | GTGTTATACTATTGTGGTGC | 42 | 1212 |
| 1065805 | 472944 | 472963 | GTTTGTTAGGGTCCCACTTG | 49 | 1213 |
| 1065821 | 474901 | 474920 | TCTGCTATTGTTGGATATCG | 33 | 1214 |
| 1065837 | 475988 | 476007 | ATGGTTAGTTTAAGAAATCG | 65 | 1215 |
| 1065853 | 478295 | 478314 | GAGTCCTGGTTGATGTGGTG | 65 | 1216 |
| 1065869 | 480141 | 480160 | ACGGGCATGCTTTATAATTA | 73 | 1217 |
| 1065885 | 481448 | 481467 | AACCTTTGTGCATAATGGTC | 82 | 1218 |
| 1065901 | 482908 | 482927 | CACTCTATAGGTTCAAGCAG | 37 | 1219 |
| 1065917 | 483964 | 483983 | CCAGGGTAGGATTCATGGTC | 63 | 1220 |
| 1065932 | 484673 | 484692 | TGTTGTATGCAGGTTCATCA | 31 | 1221 |
| 1065948 | 487139 | 487158 | GATACATTGTCCTCCTGGTA | 35 | 1222 |
| 1065964 | 488637 | 488656 | ACACTTGAAGCTGTTGAGTC | 66 | 1223 |
| 1065980 | 489652 | 489671 | CGTGAAGGAATGATCTCTCT | 61 | 1224 |
| 1065996 | 493855 | 493874 | CCTAATCTATGCTGGGCCCC | 75 | 1225 |
| 1066012 | 495430 | 495449 | GAGAGTAAGTTACTAGAGGC | 59 | 1226 |
| 1066028 | 498180 | 498199 | TGGGCAGATTGATCACCTAG | 93 | 1227 |
| 1066044 | 499495 | 499514 | TACTAGGCCTGCTCTACTGG | 71 | 1228 |
| 1066060 | 500523 | 500542 | TTAGAGGTCAAGCCCTGTGT | 63 | 1229 |
| 1066076 | 500885 | 500904 | GGGTCGGATATAGCTTTTAC | 31 | 1230 |
| 1066092 | 501340 | 501359 | GCTTATGTAGCTCAGCTCAA | 33 | 1231 |
| 1066108 | 501701 | 501720 | TTGGGACATCCCAAAGTTAC | 80 | 1232 |
| 1066124 | 502205 | 502224 | GGAACATCATGTTAGCCATC | 44 | 1233 |
| 1066140 | 502588 | 502607 | GATGCATCAAGCCAATGCGC | 41 | 1234 |
| 1066156 | 502882 | 502901 | GAACCTCTACAGAGAGACTA | 65 | 1235 |
| 1066172 | 503154 | 503173 | GTTCTGTATACACCATCCCA | 56 | 1236 |
| 1066188 | 503485 | 503504 | GCAAAATGTGGGTCTGCACC | 96 | 1237 |
| 1066204 | 504082 | 504101 | TAACTGGTGAACTCCTGTGA | 98 | 1238 |
| 1066220 | 504449 | 504468 | CCCCAGAAGTGGAGTAGGTA | ND | 1239 |
| 1066236 | 504866 | 504885 | CCTCAAGATCAACAGACCCC | 81 | 1240 |
| 1066252 | 505543 | 505562 | CAGTCAGGTACAGGTGTTGG | 52 | 1241 |
| 1066268 | 505823 | 505842 | GTGAGGGTGCTTAGTGAACT | 54 | 1242 |
| 1066284 | 506196 | 506215 | GTCAGAACAATCCGGCATGC | 50 | 1243 |
| 1066300 | 506730 | 506749 | GAGTGCTCCACACTTCTGTC | 65 | 1244 |
| 1066316 | 507254 | 507273 | GCTTGCAGTGCTACTGTGCC | 95 | 1245 |
| 1066332 | 507900 | 507919 | TCGATACCTGCTTTTGTGAC | 69 | 1246 |
| 1066348 | 508290 | 508309 | CATAACCGAAGTGGAAGTAG | 71 | 1247 |
| 1066364 | 508901 | 508920 | TACTTCATGACTGCCTAGTT | 78 | 1248 |
| 1066380 | 509434 | 509453 | AAGAAGGGCATATATCTACG | 72 | 1249 |
| 1066396 | 510312 | 510331 | CGGACAGTGTTGCTGTTAGG | 39 | 1250 |
| 1066412 | 510724 | 510743 | GGTCAAGCCGAATCTTGACA | 68 | 1251 |
| 1066428 | 511490 | 511509 | TGACTGGGTAAGGCAGGATC | 50 | 1252 |
| 1066444 | 511770 | 511789 | AGTACTCCTACCAATAATGG | 77 | 1253 |

TABLE 19
Reduction of UBE3A-ATS RNA by 7,000 nM 5-10-5 MOE gapmers with mixed PO/PS internucleoside
linkages in vitro (37,000 cells/well)

| | SEQ ID | SEQ ID | | UBE3A- | |
|---|---|---|---|---|---|
| Compound | NO: 1 | NO: 1 | | ATS | SEQ ID |
| Number | Start Site | Stop Site | Sequence (5′ to 3′) | (% UTC) | NO |
| 617557 | 483977 | 483996 | ATCATGTGCATACCCAGGGT | 17 | 172 |
| 749882 | 460115 | 460134 | ACTTTATAGTGTGGATGGTA | 26 | 586 |
| 750519 | 349103# | 349122# | GTCATCACCTCTCTTCAGGA | 12 | 181 |
| 1065271 | 432577 | 432596 | GGCAGTGCATTCAACTGTAG | 75 | 1254 |
| 1065287 | 440156 | 440175 | CGTGGGTTAGTCCAAGTAAC | 49 | 1255 |
| 1065303 | 442546 | 442565 | GCCCATTATGTAGTCTATAG | 37 | 1256 |
| 1065319 | 443234 | 443253 | GACGAAGGCAGTCACTCTGC | 88 | 1257 |
| 1065335 | 444735 | 444754 | GGGAGAACTACATCTCACCT | 63 | 1258 |
| 1065351 | 445658 | 445677 | CCCCATTACCACGGTCTCTT | 63 | 1259 |
| 1065367 | 446675 | 446694 | AGCAGTCTTTATCTACAGGC | 85 | 1260 |
| 1065383 | 447745 | 447764 | TTGATGACCTGGTAAGGGAT | 76 | 1261 |
| 1065399 | 448290 | 448309 | CGCAATAAGATTCCATTGCC | 83 | 1262 |
| 1065415 | 448725 | 448744 | ACGATAACTGTAGCGCATTG | 70 | 1263 |
| 1065431 | 449100 | 449119 | GCAAGTATGCTAGTCACTCA | 82 | 1264 |
| 1065447 | 449637 | 449656 | CCATTAGATAGGCTATAGGC | 77 | 1265 |
| 1065463 | 452066 | 452085 | TCGCCGCTGATTTTAAAGAT | 97 | 1266 |
| 1065479 | 452320 | 452339 | GGTTCAAAAGCCGGTGCAGG | 83 | 1267 |
| 1065495 | 453926 | 453945 | GTTGTTCTTAAGTGCCCATG | 61 | 1268 |
| 1065511 | 454740 | 454759 | GCACTTTGCATGAGAATAGG | 60 | 1269 |
| 1065527 | 455219 | 455238 | TCCAGACAAGTCTACTACCA | 69 | 1270 |
| 1065543 | 455585 | 455604 | TCTACTCCTTGCTACAAACG | 84 | 1271 |
| 1065575 | 457378 | 457397 | CAATAGTGTAGGTGACATGG | 36 | 1273 |
| 1065591 | 458400 | 458419 | GCATGTGGGCCTCTATTAAG | 8 | 1274 |
| 1065607 | 459079 | 459098 | GTATGGTATCTTGCAGTAGC | 15 | 1275 |
| 1065623 | 460427 | 460446 | ATAGCCCTTTCAGCACACTT | 16 | 1276 |
| 1065639 | 461343 | 461362 | GCTGGCAATATGTCAACCTT | 36 | 1277 |
| 1065654 | 461605 | 461624 | TGTACAAACGGGCTATGTGA | 30 | 1278 |
| 1065669 | 463151 | 463170 | CATATGAAGCTATAGGTACC | 22 | 1279 |
| 1065684 | 464383 | 464402 | GGTAGTTCACAACTCTTCCT | 59 | 1280 |
| 1065700 | 465002 | 465021 | TCTGCGAATAGAGGCCCTCT | 49 | 1281 |
| 1065715 | 465301 | 465320 | GACACGCTGACTATGATGTG | 77 | 1282 |
| 1065731 | 465875 | 465894 | CTTGCCCATGGATGGTTGTC | 71 | 1283 |
| 1065747 | 466287 | 466306 | GTGGCTTATAGGTGGGTTCC | ND | 1284 |
| 1065763 | 466945 | 466964 | GGTTGTATGCCTTCTGCATT | 44 | 1285 |
| 1065779 | 468014 | 468033 | CCTTGCAGCACTTGTATAGT | 44 | 1286 |
| 1065795 | 470319 | 470338 | ACTATCCTGCATCCGAGGCA | 23 | 1287 |
| 1065811 | 474227 | 474246 | ATATAATTGAGGGCCACCAT | 74 | 1288 |
| 1065827 | 475597 | 475616 | CCTTTAGAGGGATTTGTGTA | 34 | 1289 |
| 1065843 | 476097 | 476116 | CTTAACATGTTCATACGAGT | 47 | 1290 |
| 1065859 | 478733 | 478752 | GCTGATCACATTACCCATCC | 24 | 1291 |
| 1065875 | 480518 | 480537 | GATGTATCACGCAAACAATT | 81 | 1292 |
| 1065891 | 482167 | 482186 | ACCAAGGAGTTACAAGTGTC | 62 | 1293 |
| 1065907 | 483587 | 483606 | GGCCAGGATGGTCAACCTTA | 50 | 1294 |
| 1065922 | 484119 | 484138 | TTTTTGCCACAGCCGCTTGG | 193 | 1295 |
| 1065938 | 485811 | 485830 | CGAATAATTGCATGCCAACT | 68 | 1296 |
| 1065954 | 487606 | 487625 | GGTTTAGTGTCATATGTAGC | 23 | 1297 |
| 1065970 | 489324 | 489343 | GCACACACCTGTATAGGAGA | 43 | 1298 |
| 1065986 | 489780 | 489799 | CCTGCCACTCCCGTGGCAAC | 95 | 1299 |
| 1066002 | 493989 | 494008 | TTATGGGTAAGAGGTCGGTC | ND | 1300 |
| 1066018 | 496826 | 496845 | GGTATGGAGGCCATGTACGA | 84 | 1301 |
| 1066034 | 498510 | 498529 | GCGCCCGGCAAGAGATTCAC | ND | 1302 |
| 1066050 | 499912 | 499931 | TTGCATAATAGGAGGTCCTT | 51 | 1303 |
| 1066066 | 500662 | 500681 | GGGCTTACAACCTCTCAATT | 74 | 1304 |
| 1066082 | 500899 | 500918 | CCTAACTGGCCTTTGGGTCG | 80 | 1305 |
| 1066098 | 501446 | 501465 | GTCTGCACAGGTGGCATAGA | 53 | 1306 |
| 1066114 | 501817 | 501836 | GTCCAGAGGTCATATGGCCC | 54 | 1307 |
| 1066130 | 502416 | 502435 | GCATAAGTAAGGCATGGTCT | 41 | 1308 |
| 1066146 | 502755 | 502774 | CTTCGGGCAAATATGGCCCG | 76 | 1309 |
| 1066162 | 503036 | 503055 | GGTGCTACAGTCATACTATC | 62 | 1310 |
| 1066178 | 503346 | 503365 | GTGATCAGCTCAACACCCCC | 65 | 1311 |
| 1066194 | 503878 | 503897 | TAATAAAGGGTCAGTTGTGC | 39 | 1312 |
| 1066210 | 504270 | 504289 | CACTGCCTAAGCAAGGAATC | 86 | 1313 |
| 1066226 | 504530 | 504549 | TGCCCCAAAGATTTAGGCCA | 69 | 1314 |
| 1066242 | 505115 | 505134 | TCAGACATGGTAACCTTCAC | 40 | 1315 |
| 1066258 | 505660 | 505679 | ATTGCAGGCCTAGCTTCCAC | 51 | 1316 |
| 1066274 | 506031 | 506050 | GGTATTGAGTAGGACTTCTC | 34 | 1317 |
| 1066290 | 506402 | 506421 | CTTAAGGAGGCAACTCCTGA | 51 | 1318 |
| 1066306 | 506781 | 506800 | ATATACTCCAGGTTGTGGAG | 66 | 1319 |
| 1066322 | 507526 | 507545 | GAGCCAGGTTCCTGTTCACG | 33 | 1320 |
| 1066338 | 508110 | 508129 | CCGTCTTTAGGAACTTAAAT | 43 | 1321 |
| 1066354 | 508581 | 508600 | AGCACAACCCCCGTGCTGCT | 88 | 1322 |
| 1066370 | 509058 | 509077 | TACCCAACATGCTTGCATCC | 58 | 1323 |
| 1066386 | 510022 | 510041 | ATACACGGAACCCACAGTAG | 70 | 1324 |
| 1066402 | 510402 | 510421 | CATGCTAGGGACTCTGATTG | 69 | 1325 |
| 1066418 | 510832 | 510851 | GTTAGACCAGGCATAAGTAC | 44 | 1326 |
| 1066434 | 511638 | 511657 | TGCAGCTGAGTGCCATATAA | 56 | 1327 |
| 1066450 | 511890 | 511909 | ACTACTTGGAGACCTTCACC | 57 | 1328 |

TABLE 20
Reduction of UBE3A-ATS RNA by 7,000 nm 5-10-5 MOE gapmers with mixed PO/PS internucleoside linkages
in vitro (37,000 cells/well)

| | SEQ ID | SEQ ID | | UBE3A- | |
|---|---|---|---|---|---|
| Compound | NO: 1 | NO: 1 | | ATS | SEQ ID |
| Number | Start Site | Stop Site | Sequence (5′ to 3′) | (% UTC) | NO |
| 617557 | 483977 | 483996 | ATCATGTGCATACCCAGGGT | 35 | 172 |
| 749882 | 460115 | 460134 | ACTTTATAGTGTGGATGGTA | 26 | 586 |
| 749902 | 461442 | 461461 | GCTCCTGACAAATTAGCACT | 61 | 1329 |
| 750519 | 349103^{#} | 349122^{#} | GTCATCACCTCTCTTCAGGA | 20 | 181 |
| 1065258 | 430419 | 430438 | CGGATGCAGGGCACCCTTGG | 96 | 1330 |
| 1065274 | 432770 | 432789 | CATGATATAAGGAGAAACGC | 63 | 1331 |
| 1065290 | 440729 | 440748 | ATCTTGCGGCTGTCTCCCAG | 64 | 1332 |
| 1065306 | 442613 | 442632 | TCCCATAGTTATATGGCTCA | 60 | 1333 |
| 1065322 | 443476 | 443495 | CTGCATGTTAGATTGGGCAT | 48 | 1334 |
| 1065338 | 444879 | 444898 | GCTGTGATGCTAGGATGCAT | 84 | 1335 |
| 1065354 | 445874 | 445893 | AGACATAGACCCCAGACGGT | 83 | 1336 |
| 1065370 | 446795 | 446814 | CCCTTACCAGAATAGCATCC | 81 | 1337 |
| 1065386 | 447803 | 447822 | TGGTAGACCACTGATTCCCC | 63 | 1338 |
| 1065402 | 448415 | 448434 | AGCAAGGGTCTTAGTGCCAA | 60 | 1339 |
| 1065418 | 448742 | 448761 | GTCTGTATATTTAGACCACG | 83 | 1340 |
| 1065434 | 449159 | 449178 | GTCAACATTATATCGATGCA | 64 | 1341 |
| 1065450 | 449697 | 449716 | GTATGGCTTATGCATGCTAT | 86 | 1342 |
| 1065466 | 452137 | 452156 | TGGGCAGGTCAACTTGGTAT | 66 | 1343 |
| 1065482 | 453037 | 453056 | AAAAGGTGATTAGGCGGCCG | 88 | 1344 |
| 1065498 | 454156 | 454175 | TGACCCTTATGGAGACTTAT | 74 | 1345 |
| 1065514 | 454846 | 454865 | TCCAGGGTAGAAGACTAGCA | 63 | 1346 |
| 1065530 | 455286 | 455305 | GCAATAGAACAGATGGCCAT | 97 | 1347 |
| 1065546 | 455764 | 455783 | GTACCAAAGTGGCTGCTCAC | 89 | 1348 |
| 1065562 | 456866 | 456885 | ACTGCCCTCTTCGAAGAGAT | 71 | 1349 |
| 1065578 | 457715 | 457734 | GATTATCTCAGACATGCCAT | 20 | 1350 |
| 1065594 | 458488 | 458507 | CCTTAAGCAAGGAGTTCACT | 39 | 1351 |
| 1065610 | 459543 | 459562 | ATCCTGGTATGACTGTCAGT | 45 | 1352 |
| 1065626 | 460538 | 460557 | GGCTCTCATCTAAATAAGCC | 75 | 1353 |
| 1065657 | 461674 | 461693 | AACCCTAAGGTGAAGTCTGT | 65 | 1354 |
| 1065672 | 463245 | 463264 | GGGTATTGCTGTCCAAATGG | 20 | 1355 |
| 1065687 | 464409 | 464428 | GTGTTATGGTTCCCATTCAG | 32 | 1356 |
| 1065702 | 465012 | 465031 | CCTGCTCAAATCTGCGAATA | 58 | 1357 |
| 1065718 | 465382 | 465401 | GACTTATTGAGGATGGTGTG | 53 | 1358 |
| 1065734 | 465894 | 465913 | TGAACTCCCACAAGGTACTC | 52 | 1359 |
| 1065750 | 466341 | 466360 | AGGCATTTGGAGCATTCGGG | 16 | 1360 |
| 1065766 | 467050 | 467069 | ACTTTCATCAGTTAGTCAGG | 30 | 1361 |
| 1065782 | 468343 | 468362 | CATTGACAAGCTATTGCAGC | 44 | 1362 |
| 1065798 | 470982 | 471001 | TTTTATGGCTTATAGCAGCG | 50 | 1363 |
| 1065814 | 474563 | 474582 | CACGCCCAAATGGAACTCTA | 38 | 1364 |
| 1065830 | 475827 | 475846 | GTGAGTTATAGAGTGTTCCC | 39 | 1365 |
| 1065846 | 476165 | 476184 | TGGGCACTTAGGAGTTCCTA | 73 | 1366 |
| 1065862 | 479069 | 479088 | GCTGTATCTGTGGTTTAGCA | 67 | 1367 |
| 1065878 | 480818 | 480837 | GCGGATGCCAGTGGCCGAGA | 40 | 1368 |
| 1065894 | 482519 | 482538 | GCTATACCCCTAGGATCAGA | 31 | 1369 |
| 1065910 | 483843 | 483862 | TAGGCATTGAATGAGGGCCC | 71 | 1370 |
| 1065925 | 484245 | 484264 | GTATGGACTTGTCTTATGGC | 57 | 1371 |
| 1065941 | 486351 | 486370 | AATAGACTGCGATTATACAA | 48 | 1372 |
| 1065957 | 487807 | 487826 | CGCAATTGAACTTAAATTGG | 56 | 1373 |
| 1065973 | 489517 | 489536 | GGACCACCTAAGACCTCAAG | 50 | 1374 |
| 1065989 | 489908 | 489927 | GGCTAAAGTAATCTTATGGG | 48 | 1375 |
| 1066005 | 494490 | 494509 | GTGCAATAGCCTAAATGCCA | 69 | 1376 |
| 1066021 | 497267 | 497286 | GGATTAGGCAGCTTCACTAC | 44 | 1377 |
| 1066037 | 499088 | 499107 | GCAAATACAATGGTAATCGC | 30 | 1378 |
| 1066053 | 500286 | 500305 | CTGGTGTACATTGGATATGA | 57 | 1379 |
| 1066069 | 500694 | 500713 | GCAAGAGGTACTGTAAGCCC | 70 | 1380 |
| 1066085 | 500993 | 501012 | ATCCGATAGTCAAACTATGA | 52 | 1381 |
| 1066101 | 501532 | 501551 | AAACACCCTTCCAATGAGGG | 75 | 1382 |
| 1066117 | 501986 | 502005 | GTTCACTAGCATCTGCTACA | 46 | 1383 |
| 1066133 | 502443 | 502462 | GCTCTTTGTAGGCCCAAGGG | 38 | 1384 |
| 1066149 | 502776 | 502795 | GGTTCCTATAAGGAATAGGC | 73 | 1385 |
| 1066165 | 503096 | 503115 | TAATAGGCCTTTCTACAGCT | 77 | 1386 |
| 1066181 | 503374 | 503393 | CCCCAGGGTCATAGGAGTGT | 80 | 1387 |
| 1066197 | 503944 | 503963 | CCACCAACCTTAAATAGTAG | 70 | 1388 |
| 1066213 | 504390 | 504409 | CCACAGATTGGCTTGGAATG | 74 | 1389 |
| 1066229 | 504650 | 504669 | GCCTTACGCTTGGCTGACAT | 73 | 1390 |
| 1066245 | 505179 | 505198 | GTCTCTGTGTACCGAGCTCA | 63 | 1391 |
| 1066261 | 505724 | 505743 | GTCTGGTGGCCAAGTGCTTC | 70 | 1392 |
| 1066277 | 506116 | 506135 | AGCCGAGCATTGGCTTCATA | 73 | 1393 |
| 1066293 | 506584 | 506603 | GGTGGTGGAATGCTGTCCAC | 89 | 1394 |
| 1066309 | 506869 | 506888 | CTCCACCAAATACTTAGCCC | 67 | 1395 |
| 1066325 | 507649 | 507668 | TAAATGTCAGGAGGTCCCCC | 55 | 1396 |
| 1066341 | 508126 | 508145 | CCTTGGGTTATTCTTACCGT | 55 | 1397 |
| 1066357 | 508680 | 508699 | GGTAGTATAAGAATGGTTCC | 54 | 1398 |
| 1066373 | 509104 | 509123 | ATACACTTGGGCCCAAATGG | 78 | 1399 |
| 1066389 | 510039 | 510058 | GCTAGCATTTGAGAGTTATA | 43 | 1400 |
| 1066405 | 510647 | 510666 | GGCTGTAAGGGATTAAGATG | 79 | 1401 |
| 1066421 | 510853 | 510872 | CTGTTACAGGGAGACAATCT | 56 | 1402 |
| 1066437 | 511678 | 511697 | ACCCTGCACAAATGGACTGC | 103 | 1403 |

TABLE 21
Reduction of UBE3A-ATS RNA by 7,000 nM 5-10-5 MOE gapmers with mixed PO/PS internucleoside linkages
in vitro (37,000 cells/well)

| | SEQ ID | SEQ ID | | UBE3A- | |
|---|---|---|---|---|---|
| Compound | NO: 1 | NO: 1 | | ATS | SEQ ID |
| Number | Start Site | Stop Site | Sequence (5′ to 3′) | (% UTC) | NO |
| 617557 | 483977 | 483996 | ATCATGTGCATACCCAGGGT | 42 | 172 |
| 749882 | 460115 | 460134 | ACTTTATAGTGTGGATGGTA | 33 | 586 |
| 750519 | 349103^{#} | 349122^{#} | GTCATCACCTCTCTTCAGGA | 21 | 181 |
| 1065268 | 432234 | 432253 | GGGCACCCCCGTCACCGTGC | 82 | 1404 |
| 1065284 | 433765 | 433784 | AGATTTTCCGACCTATGTCA | 62 | 1405 |
| 1065300 | 442386 | 442405 | ATCGCCATGGTCACTTGCCA | 63 | 1406 |
| 1065316 | 443032 | 443051 | GGCAAAGCAAGTTCGCCACA | 91 | 1407 |
| 1065332 | 444610 | 444629 | ATCATACAGGTCACTTGGCT | 63 | 1408 |
| 1065348 | 445505 | 445524 | ATTGGACTAGGTAACAGTGA | 103 | 1409 |
| 1065364 | 446595 | 446614 | CAGGCTATTTCTTAGTGGAC | 59 | 1410 |
| 1065380 | 447562 | 447581 | CAAGGGTAACCTATAGCTGA | 116 | 1411 |
| 1065396 | 448099 | 448118 | GCATATGCACACTTGGATCA | 89 | 1412 |
| 1065412 | 448676 | 448695 | ACCCTGAAAACAATCAATCG | 102 | 1413 |
| 1065428 | 449061 | 449080 | ACGATAATCATGTGGCCTGA | 85 | 1414 |
| 1065444 | 449593 | 449612 | GACTAACTATACAGGTCTCT | 107 | 1415 |
| 1065460 | 451288 | 451307 | ACTACCTAGGCTCACTTGCT | 83 | 1416 |
| 1065476 | 452297 | 452316 | CCAGGATGCTAATGCTCCTA | 69 | 1417 |
| 1065492 | 453781 | 453800 | GCGCTTTCACCAAGAAATTT | 78 | 1418 |
| 1065508 | 454575 | 454594 | GCAAAGACTACACCGTGACA | 109 | 1419 |
| 1065524 | 455153 | 455172 | CCCCTGCATTCAGCTTATAG | 85 | 1420 |
| 1065540 | 455467 | 455486 | GCTATCCAAGTGACACAGTA | 77 | 1421 |
| 1065556 | 456757 | 456776 | GGGCCGCACATCTGGACCTC | 104 | 1422 |
| 1065572 | 457293 | 457312 | TACAAAACGACCTAAAGACC | 83 | 1423 |
| 1065588 | 458156 | 458175 | CTGCAATCCTTAAGACTTGA | 37 | 1424 |
| 1065604 | 458952 | 458971 | CCTCAAGACCTATAGGACCT | 37 | 1425 |
| 1065620 | 460284 | 460303 | ATACATTGCCAGCACTAAGG | 60 | 1426 |
| 1065636 | 460849 | 460868 | GATTTACCACACATATAGGC | 36 | 1427 |
| 1065651 | 461597 | 461616 | CGGGCTATGTGAGATAATTC | 15 | 1428 |
| 1065666 | 462686 | 462705 | GGCTGACATGCCCCTTTTAA | 142 | 1429 |
| 1065681 | 463881 | 463900 | GTTGTGATAGTCAACAATTG | 89 | 1430 |
| 1065697 | 464991 | 465010 | AGGCCCTCTTGTTTCAATTG | 63 | 1431 |
| 1065712 | 465246 | 465265 | GATTTTATTGGTCATCTCGG | 30 | 1432 |
| 1065728 | 465606 | 465625 | GCCTTTCTATTTCAGACCGA | 35 | 1433 |
| 1065744 | 466263 | 466282 | GGAGTCCATGAAGTAACTGG | 62 | 1434 |
| 1065760 | 466538 | 466557 | AGGTTGCATAAAGCCAGGCC | 55 | 1435 |
| 1065776 | 467801 | 467820 | CCCTCTTAGTGATTGGTGGT | 63 | 1436 |
| 1065792 | 470049 | 470068 | GGTTGGCAGTCTTCACCAGT | 62 | 1437 |
| 1065808 | 474120 | 474139 | GCTTGAATGGATACCAATTA | 40 | 1438 |
| 1065824 | 475447 | 475466 | CTCGGTCAAACTAATAATAC | 53 | 1439 |
| 1065840 | 476015 | 476034 | CCAGTTTTCGCCCGTTACCT | 32 | 1440 |
| 1065856 | 478440 | 478459 | GTAGCTATAGGTGTCACATA | 21 | 1441 |
| 1065872 | 480351 | 480370 | GCCTCAAATATGTGATGCAC | 45 | 1442 |
| 1065888 | 482108 | 482127 | GAATGGCAATACATCCGTGT | 80 | 1443 |
| 1065904 | 483359 | 483378 | TCAATGGACCCACATGATCA | 63 | 1444 |
| 1065920 | 483971 | 483990 | TGCATACCCAGGGTAGGATT | 29 | 1445 |
| 1065935 | 485084 | 485103 | TCTAATACTACAACGATGGA | 84 | 1446 |
| 1065951 | 487204 | 487223 | AACCTTCCTAAAATCCCCGA | 52 | 1447 |
| 1065967 | 489085 | 489104 | GATATACCCAGTTAATCAGT | 63 | 1448 |
| 1065983 | 489731 | 489750 | ACCGGTTCCCAATTTTCTCC | 78 | 140 |
| 1065999 | 493889 | 493908 | TTGGCAGATGTAACCTATTC | 52 | 1449 |
| 1066015 | 496809 | 496828 | CGACCCTCATCACTTTTTGA | 73 | 1450 |
| 1066031 | 498209 | 498228 | ACGGGACCTCAATACTCTAC | 56 | 1451 |
| 1066047 | 499678 | 499697 | ATTCAAGGTAGCCCCAATAC | 89 | 1452 |
| 1066063 | 500578 | 500597 | CTACTGGCATCAGTCAAAAC | 84 | 150 |
| 1066079 | 500894 | 500913 | CTGGCCTTTGGGTCGGATAT | 86 | 1453 |
| 1066095 | 501390 | 501409 | CCCCAGATAATGCATAGATC | 98 | 1454 |
| 1066111 | 501763 | 501782 | GGGCTAAGAGTCACCTGTAT | 59 | 1455 |
| 1066127 | 502360 | 502379 | CCCTTGGCCACCTGACTTCG | 77 | 1456 |
| 1066143 | 502629 | 502648 | TTGGCTCAGTGTTCACTTCG | 52 | 1457 |
| 1066159 | 502939 | 502958 | GTAACCAGACCCAAGGCACT | 62 | 1458 |
| 1066175 | 503325 | 503344 | GAGATCCATGAGGTATATAC | 55 | 1459 |
| 1066191 | 503815 | 503834 | GCCCAGTGCCCTATAGGTCA | 67 | 1460 |
| 1066207 | 504127 | 504146 | GCTATTTCATTAAGTCACCC | 39 | 1461 |
| 1066223 | 504502 | 504521 | CCATGGAATGGCTGTCATGC | 72 | 1462 |
| 1066239 | 504974 | 504993 | TTATCTTCTTAGGGTCGACT | 38 | 1463 |
| 1066255 | 505635 | 505654 | AGCTATCCGCTTCCCAAGGG | 47 | 1464 |
| 1066271 | 505906 | 505925 | CCCTGAGATGCTAGTTGGGC | 85 | 1465 |
| 1066287 | 506256 | 506275 | GTATGTCCTTGGAGGTGAGC | 88 | 1466 |
| 1066303 | 506744 | 506763 | GCCTTTCATTTTGGGAGTGC | 48 | 1467 |
| 1066319 | 507364 | 507383 | GGCATGGAGATCCAACCTGT | 96 | 1468 |
| 1066335 | 507919 | 507938 | GGCACTGCAGGATAGCCATT | 95 | 1469 |
| 1066351 | 508470 | 508489 | CGTTATCCTAAGAAGTGACT | 58 | 1470 |
| 1066367 | 509003 | 509022 | TCAACATGTGTTAACGGAAC | 63 | 1471 |
| 1066383 | 509910 | 509929 | GTACCTGCAGTGCATAGAGC | 52 | 1472 |
| 1066399 | 510387 | 510406 | GATTGATTCAGTGCTCATGC | 49 | 1473 |
| 1066415 | 510747 | 510766 | ACTGCAGATAGGTAGGTGAT | 43 | 1474 |
| 1066431 | 511593 | 511612 | GTTGGAAGCTGCCAGCTTAG | 96 | 1475 |
| 1066447 | 511795 | 511814 | ACTGGCCTGTGGCAGTTAAC | 80 | 1476 |

TABLE 22
Reduction of UBE3A-ATS RNA by 7,000 nM 5-10-5 MOE gapmers with with mixed PO/PS internucleoside
linkages in vitro (37,000 cells/well)

| | SEQ ID | SEQ ID | | UBE3A- | |
|---|---|---|---|---|---|
| Compound | NO: 1 | NO: 1 | | ATS | SEQ ID |
| Number | Start Site | Stop Site | Sequence (5′ to 3′) | (%UTC) | NO |
| 617557 | 483977 | 483996 | ATCATGTGCATACCCAGGGT | 28 | 172 |
| 749882 | 460115 | 460134 | ACTTTATAGTGTGGATGGTA | 24 | 586 |
| 750519 | 349103^{#} | 349122^{#} | GTCATCACCTCTCTTCAGGA | 17 | 181 |
| 1065261 | 430489 | 430508 | GCGCTGGCTCACGCATGCTC | 65 | 1477 |
| 1065277 | 432989 | 433008 | CCTAGAGTTTCCTTCTCCCG | 79 | 1478 |
| 1065293 | 441703 | 441722 | GGGATGCCAATGCCTCCAAC | 97 | 1479 |
| 1065309 | 442707 | 442726 | TAAATTGCCCTGGGTGCAGC | 71 | 1480 |
| 1065325 | 443778 | 443797 | GCCCTTTCAGGACCAACTGG | 107 | 1481 |
| 1065341 | 445116 | 445135 | GTTGGGCAAACAAGTTACCC | 92 | 1482 |
| 1065357 | 446183 | 446202 | GGGACCCCAATTTACTACGC | 112 | 1483 |
| 1065373 | 446912 | 446931 | CTTCTTGCAAGGATTGGCAC | 69 | 1484 |
| 1065389 | 447847 | 447866 | ACTGAGATGTGTGATACTCC | 70 | 1485 |
| 1065405 | 448471 | 448490 | CCACTCAATAGAATAGTGCC | 123 | 1486 |
| 1065421 | 448838 | 448857 | CCCAATTGCAAGGACCCTTA | 80 | 1487 |
| 1065437 | 449334 | 449353 | GAACATGTAGCCATAATGCC | 65 | 1488 |
| 1065453 | 449867 | 449886 | GAGTGGCATCCTTAAATCCT | 66 | 1489 |
| 1065469 | 452204 | 452223 | TAATTGGTCAAGTAAACAGC | 73 | 1490 |
| 1065485 | 453199 | 453218 | TCCACCGTTACTGATTATCT | 51 | 1491 |
| 1065501 | 454230 | 454249 | CAAGTCCCACCATGTTAATC | 87 | 1492 |
| 1065517 | 454913 | 454932 | GTTAGGATCTATTTGACAGC | 67 | 1493 |
| 1065533 | 455318 | 455337 | AGGCCTGCTCCGAATGTGTT | 107 | 1494 |
| 1065549 | 456627 | 456646 | GTGCATGGTTATCTAATGCA | 87 | 1495 |
| 1065565 | 456917 | 456936 | TTGGGTCACTAGGCACACTA | 110 | 1496 |
| 1065581 | 457899 | 457918 | TGACTAGTTCGATAAGTTTT | 48 | 1497 |
| 1065597 | 458561 | 458580 | TGTCGAGAACTCAAAAGGTG | 31 | 1498 |
| 1065613 | 459646 | 459665 | CTGTATAGTTTACCCAGGCA | 24 | 1499 |
| 1065629 | 460641 | 460660 | CAGAGTGCATTGGCAACTCG | 50 | 1500 |
| 1065644 | 461457 | 461476 | GATCTTGGTAAGGCAGCTCC | 29 | 1501 |
| 1065660 | 461891 | 461910 | CAATTTGGTCCCATTGTAGT | 84 | 1502 |
| 1065675 | 463503 | 463522 | TCTATCAAGGCTGTTATTGG | 40 | 1503 |
| 1065690 | 464528 | 464547 | GCTCAGTTAGGTTAGTGCAC | 23 | 1504 |
| 1065705 | 465162 | 465181 | TCTAGGGCTCCAGTTTATGT | 78 | 1505 |
| 1065721 | 465442 | 465461 | CTTTGGTTATGTACATTGCC | 73 | 1506 |
| 1065737 | 466098 | 466117 | GCCTGTATGTCTTGAGAAAC | 78 | 1507 |
| 1065753 | 466388 | 466407 | CTCGCTTTTCACAGGAGCGC | 36 | 1508 |
| 1065769 | 467300 | 467319 | TCACAGAGTAGTCTATTGGT | 43 | 1509 |
| 1065785 | 468922 | 468941 | GTAAGTATAGATGCCTCTCC | 33 | 1510 |
| 1065801 | 472475 | 472494 | GCAAACTTTAGGAGTGTGTT | 60 | 1511 |
| 1065817 | 474799 | 474818 | GGTATTGACACCTCCAACTG | 18 | 1512 |
| 1065833 | 475854 | 475873 | ATATAAGGGTAATACGGACC | 39 | 1513 |
| 1065849 | 476362 | 476381 | GCCCCCTGCCGTGTGAAAGA | 72 | 1514 |
| 1065865 | 479579 | 479598 | CTTCAAGACTAAGGTAGGGA | 38 | 1515 |
| 1065881 | 480923 | 480942 | GTATGCGAAGCGAACGAAGC | 75 | 1516 |
| 1065897 | 482786 | 482805 | CCTAAAAAACCCGTGTACAC | 62 | 1517 |
| 1065913 | 483907 | 483926 | GGTGGCCTTCAGTCAGTACA | 57 | 1518 |
| 1065928 | 484317 | 484336 | GCCCAGACTCATGCTGGTTA | 96 | 1519 |
| 1065944 | 486448 | 486467 | ATACTTCACCTAATAGCACC | 86 | 1520 |
| 1065960 | 488086 | 488105 | GGAGTTCTTTAGGTTGGAAC | 62 | 1521 |
| 1065976 | 489542 | 489561 | GCAACTATGGGTGGAGACAT | 53 | 1522 |
| 1065992 | 493191 | 493210 | TCGGGCCAGGTCCAGGCGCA | 52 | 1523 |
| 1066008 | 495127 | 495146 | GCTGTCATATGGGAACTACG | 57 | 1524 |
| 1066024 | 497743 | 497762 | CAAACCTACGCCAATAAAGA | 86 | 1525 |
| 1066040 | 499138 | 499157 | TTTATCGCTTAAAGTAGCCT | 83 | 1526 |
| 1066056 | 500407 | 500426 | CGTATATCGAATACCCTCAA | 33 | 1527 |
| 1066072 | 500818 | 500837 | GTAAGAGTTAGCTATTCCCC | 30 | 1528 |
| 1066088 | 501153 | 501172 | CAGTAAAGAGCCACCTAAGG | 71 | 1529 |
| 1066104 | 501574 | 501593 | GGCAAGGCTAAGGAGTGCTC | 54 | 1530 |
| 1066120 | 502129 | 502148 | GCTACCCATTAGACCCATGG | 34 | 1531 |
| 1066136 | 502502 | 502521 | GGAGTCCCTGTGTCATTGGA | 37 | 1532 |
| 1066152 | 502803 | 502822 | GGATGTAGCCCATCAACCCT | 77 | 1533 |
| 1066168 | 503118 | 503137 | CCAGTTAATCTCTGACATGG | 57 | 1534 |
| 1066184 | 503422 | 503441 | AGGTGATGACACCCCTACCA | 57 | 1535 |
| 1066200 | 503960 | 503979 | GGGTGTCTCTTTGACACCAC | 76 | 1536 |
| 1066216 | 504419 | 504438 | AGGCAGTCAGGGTAATGCTA | 76 | 1537 |
| 1066232 | 504667 | 504686 | CCTTCTGTCCCAACGGAGCC | 111 | 1538 |
| 1066248 | 505213 | 505232 | CTCTCGCTGAGGACACATCA | 64 | 1539 |
| 1066264 | 505791 | 505810 | ACCACAGGGTACTATTCTGG | 64 | 1540 |
| 1066280 | 506126 | 506145 | CTGCTCTGTTAGCCGAGCAT | 75 | 1541 |
| 1066296 | 506634 | 506653 | GCTTGTATGCCCCACTGGAG | 59 | 1542 |
| 1066312 | 507213 | 507232 | GCTTGCCATGTTTTATAGAC | 80 | 1543 |
| 1066328 | 507762 | 507781 | CTCAGGATCGCTGGCCATTT | 62 | 1544 |
| 1066344 | 508223 | 508242 | GCCTAAAGGTAGTTCTCCCT | 57 | 1545 |
| 1066360 | 508731 | 508750 | CAGGAGGGTGTCAACCAGAC | 75 | 1546 |
| 1066376 | 509178 | 509197 | GGCAGATAACCTCCAAGTGC | 95 | 1547 |
| 1066392 | 510128 | 510147 | CACATAGACCATAGCTGAAC | 56 | 1548 |
| 1066408 | 510668 | 510687 | GTCTAGTATGTCTGAGTGTC | 87 | 1549 |
| 1066424 | 511065 | 511084 | GACTCGGGACATTTAGGATG | 72 | 1550 |
| 1066440 | 511730 | 511749 | ATAGGCCACGCTGGTCACTG | 48 | 1551 |

TABLE 23
Reduction of UBE3A-ATS RNA by 7,000 nM 5-10-5 MOE gapmers with with mixed PO/PS internucleoside
linkages in vitro (37,000 cells/well)

| | SEQ ID | SEQ ID | | UBE3A- | |
|---|---|---|---|---|---|
| Compound | NO: 1 | NO: 1 | | ATS | SEQ ID |
| Number | Start Site | Stop Site | Sequence (5′ to 3′) | (% UTC) | NO |
| 617557 | 483977 | 483996 | ATCATGTGCATACCCAGGGT | 39 | 172 |
| 749882 | 460115 | 460134 | ACTTTATAGTGTGGATGGTA | 16 | 586 |
| 750519 | 349103# | 349122# | GTCATCACCTCTCTTCAGGA | 14 | 181 |
| 1065260 | 430471 | 430490 | TCATCCTCTATGGACCCACG | 83 | 1552 |
| 1065276 | 432973 | 432992 | CCCGACTTACATTACCTACC | 69 | 1553 |
| 1065292 | 441621 | 441640 | ATGATCTGCTGTTCAGTGCG | 45 | 1554 |
| 1065308 | 442687 | 442706 | AGGCCAAGTGGTGCTCTTCC | 58 | 1555 |
| 1065324 | 443691 | 443710 | ATTCAGATACTAGTTTACCC | 36 | 1556 |
| 1065340 | 445011 | 445030 | TCTAGGTAGGCTGAGCCTCA | 89 | 1557 |
| 1065356 | 445972 | 445991 | TTGTCTTGGAACATACGGAT | 81 | 1558 |
| 1065372 | 446901 | 446920 | GATTGGCACTATTTTGAGCC | 113 | 1559 |
| 1065388 | 447835 | 447854 | GATACTCCAAATATGACCCG | 80 | 1560 |
| 1065404 | 448465 | 448484 | AATAGAATAGTGCCAGTAGG | 70 | 1561 |
| 1065420 | 448833 | 448852 | TTGCAAGGACCCTTAAGTCA | 87 | 1562 |
| 1065436 | 449328 | 449347 | GTAGCCATAATGCCATAGTC | 61 | 1563 |
| 1065452 | 449862 | 449881 | GCATCCTTAAATCCTGGTTG | 97 | 1564 |
| 1065468 | 452186 | 452205 | GCAATATCCATAGTGATCTG | 84 | 1565 |
| 1065484 | 453194 | 453213 | CGTTACTGATTATCTTATCC | 72 | 1566 |
| 1065500 | 454225 | 454244 | CCCACCATGTTAATCAAGGC | 69 | 1567 |
| 1065516 | 454863 | 454882 | CAGGTGTATATTCCCTATCC | 70 | 1568 |
| 1065532 | 455309 | 455328 | CCGAATGTGTTATTTATCCT | 58 | 1569 |
| 1065548 | 456621 | 456640 | GGTTATCTAATGCATCATCA | 71 | 1570 |
| 1065564 | 456909 | 456928 | CTAGGCACACTAAAGTGCAC | 84 | 1571 |
| 1065580 | 457802 | 457821 | GATGCAATCACAGCAAGTAC | 68 | 1572 |
| 1065596 | 458560 | 458579 | GTCGAGAACTCAAAAGGTGA | 51 | 1573 |
| 1065612 | 459639 | 459658 | GTTTACCCAGGCAATGGCTC | 70 | 1574 |
| 1065628 | 460629 | 460648 | GCAACTCGATGTTCTTGCTT | 79 | 1575 |
| 1065643 | 461453 | 461472 | TTGGTAAGGCAGCTCCTGAC | 58 | 1576 |
| 1065659 | 461886 | 461905 | TGGTCCCATTGTAGTTGTGT | 50 | 1577 |
| 1065674 | 463502 | 463521 | CTATCAAGGCTGTTATTGGT | 29 | 1578 |
| 1065689 | 464477 | 464496 | GCTTCTAACTAACATGCCTC | 61 | 1579 |
| 1065704 | 465158 | 465177 | GGGCTCCAGTTTATGTATCC | 79 | 1580 |
| 1065720 | 465418 | 465437 | TAGCCTGCATGGTTTACAGT | 72 | 1581 |
| 1065736 | 466030 | 466049 | GGGCTCTTGTTACTGAGCTG | 79 | 1582 |
| 1065752 | 466382 | 466401 | TTTCACAGGAGCGCACTTGG | 55 | 1583 |
| 1065768 | 467295 | 467314 | GAGTAGTCTATTGGTGTTCC | 27 | 1584 |
| 1065784 | 468404 | 468423 | CCCTACCCTTGCATGCTATG | 75 | 1585 |
| 1065800 | 471928 | 471947 | CCATTGAGTATATTACCTCC | 45 | 1586 |
| 1065816 | 474789 | 474808 | CCTCCAACTGTAATCATTGA | 65 | 1587 |
| 1065832 | 475846 | 475865 | GTAATACGGACCTCATACAG | 61 | 1588 |
| 1065848 | 476316 | 476335 | ACTACTTGTCCCCTGGGCTT | 45 | 1589 |
| 1065864 | 479256 | 479275 | CTTGCTTGTATGGTCTGATG | 63 | 1590 |
| 1065880 | 480830 | 480849 | AAAAGTAGGTTTGCGGATGC | 61 | 1591 |
| 1065896 | 482778 | 482797 | ACCCGTGTACACAGTGGGAT | 60 | 1592 |
| 1065912 | 483896 | 483915 | GTCAGTACACAAGCAGGTAG | 68 | 1593 |
| 1065927 | 484309 | 484328 | TCATGCTGGTTACTAGGGCC | 42 | 1594 |
| 1065943 | 486378 | 486397 | GTTAGGCCACAAGACTTAAT | 51 | 1595 |
| 1065959 | 488046 | 488065 | CTCAAACCCGTATAAAGATG | 58 | 1596 |
| 1065975 | 489527 | 489546 | GACATACAATGGACCACCTA | 70 | 1597 |
| 1065991 | 489961 | 489980 | GGAAGTTCCAACCCTTACTC | 64 | 1598 |
| 1066007 | 494921 | 494940 | GAATCCACTACATGGGATTA | 110 | 1599 |
| 1066023 | 497674 | 497693 | GACTAAGCCCGAAAGTTAGC | 79 | 1600 |
| 1066039 | 499133 | 499152 | CGCTTAAAGTAGCCTAAGGA | 41 | 1601 |
| 1066055 | 500400 | 500419 | CGAATACCCTCAACTTCACC | 59 | 1602 |
| 1066071 | 500797 | 500816 | CAACCTTGATAGCAGCTTAT | 38 | 1603 |
| 1066087 | 501007 | 501026 | GTGAAACTAAGCACATCCGA | 77 | 1604 |
| 1066103 | 501569 | 501588 | GGCTAAGGAGTGCTCTTTGT | 66 | 1605 |
| 1066119 | 502125 | 502144 | CCCATTAGACCCATGGCTCA | 21 | 1606 |
| 1066135 | 502465 | 502484 | TACAACAGTCCCAGGCTAGG | 51 | 1607 |
| 1066151 | 502799 | 502818 | GTAGCCCATCAACCCTGGGA | 72 | 1608 |
| 1066167 | 503107 | 503126 | CTGACATGGACTAATAGGCC | 47 | 1609 |
| 1066183 | 503415 | 503434 | GACACCCCTACCATGGCTAC | 54 | 1610 |
| 1066199 | 503956 | 503975 | GTCTCTTTGACACCACCAAC | 62 | 1611 |
| 1066215 | 504408 | 504427 | GTAATGCTATCTTCCATGCC | 47 | 1612 |
| 1066231 | 504661 | 504680 | GTCCCAACGGAGCCTTACGC | 62 | 1613 |
| 1066247 | 505200 | 505219 | CACATCAGCTGTTAGCAGTC | 64 | 1614 |
| 1066263 | 505749 | 505768 | ACTCTGTAGGTTGACAGGAC | 59 | 1615 |
| 1066279 | 506121 | 506140 | CTGTTAGCCGAGCATTGGCT | 88 | 1616 |
| 1066295 | 506628 | 506647 | ATGCCCCACTGGAGAAGTCT | 77 | 1617 |
| 1066311 | 506997 | 507016 | CGTCTTCCCGCACCATGCAT | 40 | 1618 |
| 1066327 | 507699 | 507718 | CGTGTCACTTTCAGGTCAGC | 59 | 1619 |
| 1066343 | 508216 | 508235 | GGTAGTTCTCCCTTCTGTCA | 73 | 1620 |
| 1066359 | 508726 | 508745 | GGGTGTCAACCAGACTTCCA | ND | 1621 |
| 1066375 | 509128 | 509147 | GCTCATCACAACTGGGTGGT | 35 | 1622 |
| 1066391 | 510121 | 510140 | ACCATAGCTGAACCTGTGGC | 62 | 1623 |
| 1066407 | 510659 | 510678 | GTCTGAGTGTCAGGCTGTAA | 68 | 1624 |
| 1066423 | 510905 | 510924 | GTGTGCCATAGGTTTCAGGC | 18 | 1625 |
| 1066439 | 511725 | 511744 | CCACGCTGGTCACTGAAAGA | 70 | 1626 |

TABLE 24
Reduction of UBE3A-ATS RNA by 7,000 nM 5-10-5
MOE gapmers with mixed PO/PS internucleoside
linkages in vitro (37,000 cells/well)

| | SEQ | SEQ | | | |
|---|---|---|---|---|---|
| | ID | ID | | | |
| | NO: 1 | NO: 1 | | UBE3A- | SEQ |
| Compound | Start | Stop | Sequence | ATS | ID |
| Number | Site | Site | (5′ to 3′) | (% UTC)) | NO |
| 617557 | 483977 | 483996 | ATCATGTGCATACCCAGGGT | 49 | 172 |
| 749882 | 460115 | 460134 | ACTTTATAGTGTGGATGGTA | 25 | 586 |
| 750519 | 349103# | 349122# | GTCATCACCTCTCTTCAGGA | 10 | 181 |
| 1065266 | 432182 | 432201 | CCGCTCAATGCAGGACACCA | 79 | 1627 |
| 1065282 | 433495 | 433514 | TGCTCCATAGGTAAGATGGT | 82 | 1628 |
| 1065298 | 442149 | 442168 | TAGGCACTGCCTTTGTTGCG | 87 | 1629 |
| 1065314 | 442877 | 442896 | GTCGAAGACAATATAACATC | 59 | 1630 |
| 1065330 | 444418 | 444437 | ATCAGGGCACATGGAGTTGT | 21 | 1631 |
| 1065346 | 445359 | 445378 | CCCTTAGGTGGGAGTCTTCC | 128 | 1632 |
| 1065362 | 446536 | 446555 | GGCTCTAGACCATTGACTCA | 72 | 1633 |
| 1065378 | 447498 | 447517 | GTAGTGCCTCAATGATCCAC | 62 | 1634 |
| 1065394 | 448042 | 448061 | GGTAAAGTGGACTGGATGCC | 66 | 1635 |
| 1065410 | 448635 | 448654 | CTCATGAGGATTGCATCACA | 71 | 1636 |
| 1065426 | 449041 | 449060 | AGGAACGGCCCTGACTGTCA | 110 | 1637 |
| 1065442 | 449492 | 449511 | CCATATCAATAACAATTGGC | 111 | 1638 |
| 1065458 | 450273 | 450292 | GGAACTCCAGCCAGTGAATA | 96 | 1639 |
| 1065474 | 452270 | 452289 | ATGAGGGAAGTCTAGGTCTC | 80 | 1640 |
| 1065490 | 453360 | 453379 | ACATAGGCACTCTACTAGCT | 101 | 1641 |
| 1065506 | 454514 | 454533 | TATCAGTCATAGCTACACAC | 104 | 1642 |
| 1065522 | 455119 | 455138 | GGTGGATGTCTGACTTGACT | 61 | 1643 |
| 1065538 | 455426 | 455445 | GCTAAAGTTGTGGTCTACCA | 83 | 1644 |
| 1065554 | 220324 | 220343 | TTCTCATCATCGATCCAAAC | 60 | 1645 |
| | 456693 | 456712 | | | |
| 1065570 | 457238 | 457257 | TAATGGCTTAGCTACTCACC | 90 | 1646 |
| 1065586 | 457994 | 458013 | GAGAACCCACTTGATCTATT | 24 | 1647 |
| 1065602 | 458938 | 458957 | GGACCTCAGGAGATTGTACA | 35 | 1648 |
| 1065618 | 460111 | 460130 | TATAGTGTGGATGGTATCCT | 31 | 1649 |
| 1065634 | 460744 | 460763 | GTACACAGGGATTTGAGCCT | 12* | 1650 |
| 1065649 | 461528 | 461547 | GGAACATTCAGCTAGACTAG | 40 | 1651 |
| 1065665 | 462567 | 462586 | TAAATTGGTCTGGTTACAAG | 56 | 1652 |
| 1065679 | 463779 | 463798 | CCTATAGATTGGGCTTTAGA | 48 | 1653 |
| 1065695 | 464905 | 464924 | GTCTATATTTGGTAAGACAC | 69 | 1654 |
| 1065710 | 465240 | 465259 | ATTGGTCATCTCGGGTATAT | 18 | 1655 |
| 1065726 | 465596 | 465615 | TTCAGACCGAAGGAGTTCCT | 60 | 1656 |
| 1065742 | 466244 | 466263 | GTAGGATCTATGGCAGTTCC | 59 | 1657 |
| 1065758 | 466448 | 466467 | GTTCTACAGAGTGGAGCCAG | 65 | 1658 |
| 1065774 | 467791 | 467810 | GATTGGTGGTTTATTCATCG | 47 | 1659 |
| 1065790 | 469893 | 469912 | TACCCATTGCAAGTTAACTA | 73 | 1660 |
| 1065806 | 473260 | 473279 | TCCTAATAGTTGGAGGTGGT | ND | 1661 |
| 1065822 | 474959 | 474978 | CAGCCTAATATGTGTCATCC | 40 | 1662 |
| 1065838 | 476003 | 476022 | CGTTACCTCAATTCTATGGT | 49 | 1663 |
| 1065854 | 478299 | 478318 | ACTGGAGTCCTGGTTGATGT | 67 | 1664 |
| 1065870 | 480146 | 480165 | ACAAAACGGGCATGCTTTAT | 63 | 1665 |
| 1065886 | 481476 | 481495 | GCGGATAAATTGGATTTATC | 37 | 1666 |
| 1065902 | 483108 | 483127 | AGGCAATGGACTTAGTACAC | 21 | 1667 |
| 1065918 | 483965 | 483984 | CCCAGGGTAGGATTCATGGT | 45 | 1668 |
| 1065933 | 484683 | 484702 | CAAGTGATGATGTTGTATGC | 87 | 1669 |
| 1065949 | 487192 | 487211 | ATCCCCGAATGGGAGAGATT | 107 | 1670 |
| 1065965 | 489067 | 489086 | GTGAACGAATACTGTGGCAT | 59 | 1671 |
| 1065981 | 489671 | 489690 | CCAACCTGTCATGGGACTGC | 45 | 1672 |
| 1065997 | 493859 | 493878 | TAGGCCTAATCTATGCTGGG | 44 | 1673 |
| 1066013 | 496023 | 496042 | TCTCAAAAGACATTCGGTAC | 137 | 1674 |
| 1066029 | 498183 | 498202 | CCATGGGCAGATTGATCACC | 102 | 1675 |
| 1066045 | 499515 | 499534 | TGCCTAAGGGAGTTTGTCAC | 73 | 1676 |
| 1066061 | 500527 | 500546 | ATGTTTAGAGGTCAAGCCCT | 91 | 1677 |
| 1066077 | 500886 | 500905 | TGGGTCGGATATAGCTTTTA | 58 | 1678 |
| 1066093 | 501347 | 501366 | GACATCTGCTTATGTAGCTC | 45 | 1679 |
| 1066109 | 501708 | 501727 | AGTTACTTTGGGACATCCCA | 68 | 1680 |
| 1066125 | 502209 | 502228 | GTTTGGAACATCATGTTAGC | 49 | 1681 |
| 1066141 | 502595 | 502614 | TCCAACTGATGCATCAAGCC | 43 | 1682 |
| 1066157 | 502904 | 502923 | GCCTATATCCAACCAGCTAC | 73 | 1683 |
| 1066173 | 503217 | 503236 | CGTTGGAAACTTCAAAGGCA | 69 | 1684 |
| 1066189 | 503506 | 503525 | CCTTGGTTGTGGTGAAACCC | 72 | 1685 |
| 1066205 | 504087 | 504106 | TATCTTAACTGGTGAACTCC | 73 | 1686 |
| 1066221 | 504477 | 504496 | GGATGGTTGACCTCAAAATT | 30 | 1687 |
| 1066237 | 504952 | 504971 | TGGTTACCCATACAGTATAT | 42 | 1688 |
| 1066253 | 505549 | 505568 | GCTTTTCAGTCAGGTACAGG | 29 | 1689 |
| 1066269 | 505828 | 505847 | GACCTGTGAGGGTGCTTAGT | 81 | 1690 |
| 1066285 | 506235 | 506254 | GTTTGACCAGCTCCTTGTTG | 76 | 1691 |
| 1066301 | 506734 | 506753 | TTGGGAGTGCTCCACACTTC | 72 | 1692 |
| 1066317 | 507331 | 507350 | GATGCCCTGGTCCTAGCTTC | 60 | 1693 |
| 1066333 | 507909 | 507928 | GATAGCCATTCGATACCTGC | 56 | 1694 |
| 1066349 | 508297 | 508316 | GCTTCTACATAACCGAAGTG | 116 | 1695 |
| 1066365 | 508933 | 508952 | CTAGTGCCTATTACAATCTG | 61 | 1696 |
| 1066381 | 509882 | 509901 | CATGTGCTTTGTGGACCCAT | 47 | 1697 |
| 1066397 | 510318 | 510337 | GCTGGACGGACAGTGTTGCT | 61 | 1698 |
| 1066413 | 510733 | 510752 | GGTGATGAAGGTCAAGCCGA | 103 | 1699 |
| 1066429 | 511561 | 511580 | GTGGTTTCCAGCAGGGTGTA | 20 | 1700 |
| 1066445 | 511777 | 511796 | ACTAAAGAGTACTCCTACCA | 110 | 1701 |

TABLE 25
Reduction of UBE3A-ATS RNA by 7,000 5-10-5 MOE
gapmers with mixed PO/PS internucleoside linkages
in vitro (37,000 cells/well)

| | SEQ ID | SEQ ID | | | |
|---|---|---|---|---|---|
| | NO: 1 | NO: 1 | | UBE3A- | SEQ |
| Compound | Start | Stop | Sequence | ATS | ID |
| Number | Site | Site | (5′ to 3′) | (% UTC)) | NO |
| 617557 | 483977 | 483996 | ATCATGTGCATACCCAGGGT | 34 | 172 |
| 749882 | 460115 | 460134 | ACTTTATAGTGTGGATGGTA | 30 | 586 |
| 749921 | 462626 | 462645 | GTAATGATTTGCCCTCCTAC | 32 | 1702 |
| 750519 | 349103# | 349122# | GTCATCACCTCTCTTCAGGA | 17 | 181 |
| 1065267 | 432208 | 432227 | CCAGCGGGACCTGGACAAGC | 62 | 1703 |
| 1065283 | 433699 | 433718 | GGTGTAGTGGCAAGAAGTTC | 59 | 1704 |
| 1065299 | 442231 | 442250 | CCCCCTAGCTTTCCAATGGG | 82 | 1705 |
| 1065315 | 442923 | 442942 | GTCTCCACATAATCCTATTG | 48 | 1706 |
| 1065331 | 444553 | 444572 | ACATCCCATTAATCATCGCT | 49 | 1707 |
| 1065347 | 445388 | 445407 | TCAGATTACCTGAAGGTGTA | 104 | 1708 |
| 1065363 | 446582 | 446601 | AGTGGACAGATACGGTCCGT | 95 | 1709 |
| 1065379 | 447508 | 447527 | TCAGTTGTGAGTAGTGCCTC | 75 | 1710 |
| 1065395 | 448074 | 448093 | GCTTACCAGAGATGGTTTCC | 111 | 1711 |
| 1065411 | 448658 | 448677 | CGTAGGGCAAAAGTAAGGAT | 71 | 1712 |
| 1065427 | 449050 | 449069 | GTGGCCTGAAGGAACGGCCC | 92 | 1713 |
| 1065443 | 449532 | 449551 | GACCTTCAATTGATCAGTCT | 112 | 1714 |
| 1065459 | 450791 | 450810 | CCTGTCTGGTACTCCCATAT | 69 | 1715 |
| 1065475 | 452275 | 452294 | TCAATATGAGGGAAGTCTAG | 73 | 1716 |
| 1065491 | 453366 | 453385 | TTAACTACATAGGCACTCTA | 76 | 1717 |
| 1065507 | 454568 | 454587 | CTACACCGTGACAAAAGAGC | 76 | 1718 |
| 1065523 | 455125 | 455144 | AGCACAGGTGGATGTCTGAC | 82 | 1719 |
| 1065539 | 455450 | 455469 | GTAGTTGTATCTTGAATGGG | 65 | 1720 |
| 1065555 | 220380 | 220399 | CATCTGGACCTCAGATTGAC | 64 | 1721 |
| | 456749 | 456768 | | | |
| 1065571 | 457288 | 457307 | AACGACCTAAAGACCTAGCA | 36 | 1722 |
| 1065587 | 458044 | 458063 | CTTGAGTAACTACTCATGAC | 83 | 1723 |
| 1065603 | 458946 | 458965 | GACCTATAGGACCTCAGGAG | 33 | 1724 |
| 1065619 | 460118 | 460137 | CTAACTTTATAGTGTGGATG | 18 | 1725 |
| 1065635 | 460843 | 460862 | CCACACATATAGGCTAGCCA | 9 | 1726 |
| 1065650 | 461573 | 461592 | GGTCATCATATTGAACCAAT | 44 | 1727 |
| 1065680 | 463826 | 463845 | GATTTCCTTACTGAGTGAGC | 29 | 1728 |
| 1065696 | 464909 | 464928 | GGTAGTCTATATTTGGTAAG | 17 | 1729 |
| 1065711 | 465242 | 465261 | TTATTGGTCATCTCGGGTAT | 47 | 1730 |
| 1065727 | 465600 | 465619 | CTATTTCAGACCGAAGGAGT | 32 | 1731 |
| 1065743 | 466251 | 466270 | GTAACTGGTAGGATCTATGG | 49 | 1732 |
| 1065759 | 466496 | 466515 | TTTTTAGGGTAGTGTCCTGA | 92 | 1733 |
| 1065775 | 467797 | 467816 | CTTAGTGATTGGTGGTTTAT | 54 | 1734 |
| 1065791 | 469899 | 469918 | GGGATTTACCCATTGCAAGT | ND | 1735 |
| 1065807 | 473264 | 473283 | GCCATCCTAATAGTTGGAGG | 44 | 1736 |
| 1065823 | 475306 | 475325 | GGTTAAGTCTGCTCTTTCAC | 25 | 1737 |
| 1065839 | 476008 | 476027 | TCGCCCGTTACCTCAATTCT | 60 | 1738 |
| 1065855 | 478307 | 478326 | GCTATTACACTGGAGTCCTG | 45 | 1739 |
| 1065871 | 480150 | 480169 | CAATACAAAACGGGCATGCT | 94 | 1740 |
| 1065887 | 481747 | 481766 | GATCATTCCCTGTGGTAAAG | 68 | 1741 |
| 1065903 | 483112 | 483131 | GCTTAGGCAATGGACTTAGT | 11 | 1742 |
| 1065919 | 483969 | 483988 | CATACCCAGGGTAGGATTCA | 43 | 1743 |
| 1065934 | 484722 | 484741 | ATAACACTAACGATGAACTC | 37 | 1744 |
| 1065950 | 487198 | 487217 | CCTAAAATCCCCGAATGGGA | 98 | 1745 |
| 1065966 | 489079 | 489098 | CCCAGTTAATCAGTGAACGA | 77 | 1746 |
| 1065982 | 489676 | 489695 | ATGTTCCAACCTGTCATGGG | 71 | 1747 |
| 1065998 | 493867 | 493886 | GATGAGATTAGGCCTAATCT | 43 | 1748 |
| 1066014 | 496564 | 496583 | CCATCTACTATTAATGAGCT | 58 | 1749 |
| 1066030 | 498186 | 498205 | TCACCATGGGCAGATTGATC | 109 | 1750 |
| 1066046 | 499672 | 499691 | GGTAGCCCCAATACAGATTC | 26 | 72 |
| 1066062 | 500564 | 500583 | CAAAACATGTTCTGACCTCG | 93 | 1751 |
| 1066078 | 500892 | 500911 | GGCCTTTGGGTCGGATATAG | 93 | 1752 |
| 1066094 | 501356 | 501375 | CGTCAAACTGACATCTGCTT | 38 | 1753 |
| 1066110 | 501733 | 501752 | AGTTAACACCTATCAAGTTG | 58 | 1754 |
| 1066126 | 502355 | 502374 | GGCCACCTGACTTCGGCCCA | 115 | 1755 |
| 1066142 | 502599 | 502618 | GACTTCCAACTGATGCATCA | 42 | 1756 |
| 1066158 | 502919 | 502938 | GACCCTTCTGTGAAAGCCTA | 61 | 1757 |
| 1066174 | 503279 | 503298 | GACTGCATCTCAATCCTATG | 62 | 1758 |
| 1066190 | 503636 | 503655 | GCCCATATGCTTGAACAATT | 40 | 1759 |
| 1066206 | 504088 | 504107 | GTATCTTAACTGGTGAACTC | 55 | 1760 |
| 1066222 | 504484 | 504503 | GCAGTTTGGATGGTTGACCT | 43 | 1761 |
| 1066238 | 504963 | 504982 | GGGTCGACTGATGGTTACCC | 80 | 1762 |
| 1066254 | 505594 | 505613 | ATAGGAGCTGAATAGTAGGG | 37 | 1763 |
| 1066270 | 505833 | 505852 | TCAAAGACCTGTGAGGGTGC | 78 | 1764 |
| 1066286 | 506243 | 506262 | GGTGAGCTGTTTGACCAGCT | 49 | 1765 |
| 1066302 | 506739 | 506758 | TCATTTTGGGAGTGCTCCAC | 53 | 1766 |
| 1066318 | 507359 | 507378 | GGAGATCCAACCTGTGTGGA | 79 | 1767 |
| 1066334 | 507915 | 507934 | CTGCAGGATAGCCATTCGAT | 69 | 1768 |
| 1066350 | 508354 | 508373 | CATTATTCAATTAAGGGTGG | 15 | 1769 |
| 1066366 | 508999 | 509018 | CATGTGTTAACGGAACTGAG | 85 | 1770 |
| 1066382 | 509901 | 509920 | GTGCATAGAGCAGACTGTAC | 103 | 1771 |
| 1066398 | 510328 | 510347 | GGTTTTGAGAGCTGGACGGA | 57 | 1772 |
| 1066414 | 510740 | 510759 | ATAGGTAGGTGATGAAGGTC | 75 | 1773 |
| 1066430 | 511586 | 511605 | GCTGCCAGCTTAGAGAATCT | 95 | 1774 |
| 1066446 | 511781 | 511800 | GTTAACTAAAGAGTACTCCT | 92 | 1775 |

TABLE 26
Reduction of UBE3A-ATS RNA by 7,000 nM 5-10-5 MOE
gapmers with mixed PO/PS internucleoside linkages in
vitro (37,000 cells/well)

| | SEQ ID | SEQ ID | | UBE3A- | |
|---|---|---|---|---|---|
| Compound | NO: 1 | NO: 1 | | ATS | SEQ ID |
| Number | Start Site | Stop Site | Sequence (5′ to 3′) | (% UTC)) | NO |
| 617557 | 483977 | 483996 | ATCATGTGCATACCCAGGGT | 35 | 172 |
| 749882 | 460115 | 460134 | ACTTTATAGTGTGGATGGTA | 42 | 586 |
| 749960 | 465003 | 465022 | ATCTGCGAATAGAGGCCCTC | 56 | 33 |
| 750519 | 349103* | 349122* | GTCATCACCTCTCTTCAGGA | 16 | 181 |
| 1065272 | 432587 | 432606 | GTAGGAGATAGGCAGTGCAT | 25 | 1776 |
| 1065288 | 440174 | 440193 | AATTATACTGTCCTACTTCG | 65 | 1777 |
| 1065304 | 442560 | 442579 | GTACCCCAGAAATAGCCCAT | 45 | 1778 |
| 1065320 | 443271 | 443290 | CATCACTAGCCTAGTGATCT | 114 | 1779 |
| 1065336 | 444826 | 444845 | GGGTGCTGTCAACTGTCCCA | 45 | 1780 |
| 1065352 | 445690 | 445709 | GGCAAAGTACATACTGATCC | 54 | 1781 |
| 1065368 | 446725 | 446744 | CCTGTGCGGTAGCACTTGCC | 80 | 1782 |
| 1065384 | 447772 | 447791 | GGGCCAAGCACATAGGTATC | 74 | 1783 |
| 1065400 | 448306 | 448325 | CGTGCAAAACAAGTTTCGCA | 91 | 1784 |
| 1065416 | 448729 | 448748 | GACCACGATAACTGTAGCGC | 62 | 1785 |
| 1065432 | 449105 | 449124 | TCCTGGCAAGTATGCTAGTC | 73 | 1786 |
| 1065448 | 449643 | 449662 | ACTGATCCATTAGATAGGCT | 53 | 1787 |
| 1065464 | 452074 | 452093 | AGAACACTTCGCCGCTGATT | 76 | 1788 |
| 1065480 | 452327 | 452346 | AACATAAGGTTCAAAAGCCG | 86 | 1789 |
| 1065496 | 454063 | 454082 | CATAGATGATCCCATAATAG | 77 | 1790 |
| 1065512 | 454746 | 454765 | CCGAAAGCACTTTGCATGAG | 70 | 1791 |
| 1065528 | 455227 | 455246 | ATCCTTGATCCAGACAAGTC | 76 | 1792 |
| 1065544 | 455606 | 455625 | ATCATACAGGCATCTCAGCC | 68 | 1793 |
| 1065560 | 220447 | 220466 | TGTCACTGAGGGATCCCCAA | 83 | 1794 |
| | 456816 | 456835 | | | |
| 1065576 | 457383 | 457402 | GGATTCAATAGTGTAGGTGA | 15 | 1795 |
| 1065592 | 458407 | 458426 | GTACAATGCATGTGGGCCTC | ND | 1796 |
| 1065608 | 459102 | 459121 | ACTGGCATATTCCGATTATA | 24 | 1797 |
| 1065624 | 460467 | 460486 | CGTATTGGACCTTTCAATGA | 28 | 1798 |
| 1065640 | 461349 | 461368 | ATTGAAGCTGGCAATATGTC | 67 | 1799 |
| 1065655 | 461608 | 461627 | GCATGTACAAACGGGCTATG | 33 | 1800 |
| 1065670 | 463188 | 463207 | GGAATCTTGTAGAGGATTGG | 51 | 1801 |
| 1065685 | 464393 | 464412 | TCAGCACTTAGGTAGTTCAC | 27 | 1802 |
| 1065716 | 465309 | 465328 | TGTCTTTTGACACGCTGACT | 60 | 1803 |
| 1065732 | 465880 | 465899 | GTACTCTTGCCCATGGATGG | 42 | 1804 |
| 1065748 | 466292 | 466311 | CCCCTGTGGCTTATAGGTGG | 93 | 1805 |
| 1065764 | 466995 | 467014 | GGATGAACCTGCTTCACACA | 45 | 1806 |
| 1065780 | 468051 | 468070 | CAGATTTGCCAGGTAAAGCG | 58 | 1807 |
| 1065796 | 470320 | 470339 | AACTATCCTGCATCCGAGGC | 33 | 1808 |
| 1065812 | 474393 | 474412 | GGTCAACCAATTTGCTATTC | 23 | 1809 |
| 1065828 | 475722 | 475741 | GGTCTTGGGATTATAGTTTG | 32 | 1810 |
| 1065844 | 476155 | 476174 | GGAGTTCCTAACTCTCAATC | 78 | 1811 |
| 1065860 | 478826 | 478845 | TCTACTGAGGAACCCATCAC | 86 | 1812 |
| 1065876 | 480715 | 480734 | CGTTGCATAACATGTGTATT | 46 | 1813 |
| 1065892 | 482259 | 482278 | TACACCTGCAACAAGCCATC | 85 | 1814 |
| 1065908 | 483816 | 483835 | GAGCAAATCGGCAAAGGCAT | 43 | 1815 |
| 1065923 | 484156 | 484175 | CCAAGTGGCTTGTGGTGAAA | 87 | 1816 |
| 1065939 | 485817 | 485836 | GAACTACGAATAATTGCATG | 49 | 1817 |
| 1065955 | 487610 | 487629 | CAATGGTTTAGTGTCATATG | 27 | 1818 |
| 1065971 | 489454 | 489473 | AGTAGCTGTTTAGGCTGGAC | 58 | 1819 |
| 1065987 | 489784 | 489803 | TTGCCCTGCCACTCCCGTGG | 76 | 1820 |
| 1066003 | 494419 | 494438 | GGGATATATCACTTGGAGCT | ND | 1821 |
| 1066019 | 496833 | 496852 | CAGATTAGGTATGGAGGCCA | 49 | 1822 |
| 1066035 | 498902 | 498921 | ACGGATTAGATTCTCCAACA | 36 | 1823 |
| 1066051 | 499936 | 499955 | AGGACACATCAAGCTAGCTA | 55 | 1824 |
| 1066067 | 500680 | 500699 | AAGCCCTTTGCTTTTTCGGG | 81 | 1825 |
| 1066083 | 500908 | 500927 | GTGTTTTGACCTAACTGGCC | 65 | 1826 |
| 1066099 | 501472 | 501491 | CGTGGGTATGGTTTTCCTCT | 75 | 1827 |
| 1066115 | 501905 | 501924 | TCCAACGAGTGATAATTCAC | 81 | 1828 |
| 1066131 | 502423 | 502442 | AATTGATGCATAAGTAAGGC | 51 | 1829 |
| 1066147 | 502762 | 502781 | ATAGGCACTTCGGGCAAATA | 67 | 1830 |
| 1066163 | 503043 | 503062 | GGATTTAGGTGCTACAGTCA | 38 | 1831 |
| 1066179 | 503356 | 503375 | GTTAGCCCAGGTGATCAGCT | 57 | 1832 |
| 1066195 | 503886 | 503905 | ATTGCAACTAATAAAGGGTC | 79 | 1833 |
| 1066211 | 504295 | 504314 | GCTCTCATGTGAGAGTATGA | 81 | 1834 |
| 1066227 | 504544 | 504563 | TCATGAATTCAGGTTGCCCC | 42 | 1835 |
| 1066243 | 505149 | 505168 | CTTTGGTTGGAAGTTAGACC | 46 | 1836 |
| 1066259 | 505666 | 505685 | CTGCTTATTGCAGGCCTAGC | 69 | 1837 |
| 1066275 | 506042 | 506061 | CAGTTGAGAACGGTATTGAG | 67 | 1838 |
| 1066291 | 506447 | 506466 | GTCTGTCTTTAGGGTCACCC | 47 | 1839 |
| 1066307 | 506828 | 506847 | GCTTTAGGATGGTGTGGATC | 60 | 1840 |
| 1066323 | 507587 | 507606 | CTCTCACTGACTAGCTTTCG | 57 | 1841 |
| 1066339 | 508114 | 508133 | CTTACCGTCTTTAGGAACTT | 47 | 1842 |
| 1066355 | 508585 | 508604 | GGACAGCACAACCCCCGTGC | 94 | 1843 |
| 1066371 | 509070 | 509089 | CCCTACAATGCATACCCAAC | 58 | 1844 |
| 1066387 | 510027 | 510046 | GAGTTATACACGGAACCCAC | 56 | 1845 |
| 1066403 | 510410 | 510429 | GTCCAAGACATGCTAGGGAC | 71 | 1846 |
| 1066419 | 510839 | 510858 | CAATCTAGTTAGACCAGGCA | 31 | 1847 |
| 1066435 | 511667 | 511686 | ATGGACTGCCGGCCTGGAGC | 49 | 1848 |
| 1066451 | 511894 | 511913 | GTGAACTACTTGGAGACCTT | 50 | 1849 |

TABLE 27
Reduction of UBE3A-ATS RNA by 7,000 nM 5-10-5 MOE gapmers with mixed
PO/PS internucleoside linkages in vitro (37,000 cells/well)

| | SEQ ID | SEQ ID | | UBE3A- | |
|---|---|---|---|---|---|
| Compound | NO: 1 | NO: 1 | | ATS | SEQ ID |
| Number | Start Site | Stop Site | Sequence (5′ to 3′) | (% UTC)) | NO |
| 617557 | 483977 | 483996 | ATCATGTGCATACCCAGGGT | 31 | 172 |
| 749882 | 460115 | 460134 | ACTTTATAGTGTGGATGGTA | 17 | 586 |
| 750519 | 349103# | 349122# | GTCATCACCTCTCTTCAGGA | 16 | 181 |
| 1065273 | 432754 | 432773 | ACGCAACTGAGACAATCCAT | 33 | 1850 |
| 1065289 | 440229 | 440248 | GTGGCTGTGCTGGATATTAC | 48 | 1851 |
| 1065305 | 442574 | 442593 | GAGCAAAATGGTCAGTACCC | 43 | 1852 |
| 1065321 | 443357 | 443376 | GATAGGTCAGTCACTCACTG | 40 | 1853 |
| 1065337 | 444867 | 444886 | GGATGCATTGGTGTCAAGAG | 47 | 1854 |
| 1065353 | 445763 | 445782 | GGTTTACACATGATAGGAAC | 80 | 1855 |
| 1065369 | 446772 | 446791 | AACAACGGTTGCAGGGACAG | 29 | 1856 |
| 1065385 | 447787 | 447806 | CCCCGTGTACAGTAAGGGCC | 73 | 1857 |
| 1065401 | 448408 | 448427 | GTCTTAGTGCCAAATATCCA | 52 | 1858 |
| 1065417 | 448735 | 448754 | TATTTAGACCACGATAACTG | 100 | 1859 |
| 1065433 | 449118 | 449137 | TCCCTCTTGTAGATCCTGGC | 40 | 1860 |
| 1065449 | 449666 | 449685 | GAGATATGATTAGTACTGGA | 63 | 1861 |
| 1065465 | 452079 | 452098 | GAGATAGAACACTTCGCCGC | 39 | 1862 |
| 1065481 | 453032 | 453051 | GTGATTAGGCGGCCGGGCGC | 119 | 1863 |
| 1065497 | 454151 | 454170 | CTTATGGAGACTTATATACC | 61 | 1864 |
| 1065513 | 454842 | 454861 | GGGTAGAAGACTAGCATACA | 22 | 1865 |
| 1065529 | 455233 | 455252 | GTACTTATCCTTGATCCAGA | 48 | 1866 |
| 1065545 | 455636 | 455655 | AGCACAAGATTGGTTCCATT | 47 | 1867 |
| 1065561 | 456827 | 456846 | GGGTACTATGTTGTCACTGA | N.D | 1868 |
| 1065577 | 457571 | 457590 | ATGAACCATGGAGTCTCTAT | 77 | 1869 |
| 1065593 | 458456 | 458475 | GGCTTTATACTTTACCCAAC | 15 | 1870 |
| 1065609 | 459265 | 459284 | GTAGATAACTTTACCTTGAC | 14 | 1871 |
| 1065625 | 460511 | 460530 | GTTTATAGGGTGGTTGGTTC | N.D. | 1872 |
| 1065641 | 461413 | 461432 | GGGTTACTTTCCAATAGAGT | 11 | 1873 |
| 1065656 | 461610 | 461629 | AGGCATGTACAAACGGGCTA | 73 | 1874 |
| 1065671 | 463193 | 463212 | GTTCTGGAATCTTGTAGAGG | 11 | 1875 |
| 1065686 | 464398 | 464417 | CCCATTCAGCACTTAGGTAG | 23 | 1876 |
| 1065701 | 465011 | 465030 | CTGCTCAAATCTGCGAATAG | 73 | 1877 |
| 1065717 | 465374 | 465393 | GAGGATGGTGTGTATGTTAT | 31 | 1878 |
| 1065733 | 465889 | 465908 | TCCCACAAGGTACTCTTGCC | 61 | 1879 |
| 1065749 | 466296 | 466315 | GCATCCCCTGTGGCTTATAG | 65 | 1880 |
| 1065765 | 467043 | 467062 | TCAGTTAGTCAGGTTAGGGA | 7 | 1881 |
| 1065781 | 468335 | 468354 | AGCTATTGCAGCTATGGGTT | 35 | 1882 |
| 1065797 | 470401 | 470420 | GTTCAACCATCGAGATGATC | 64 | 1883 |
| 1065813 | 474404 | 474423 | GATAGGGTTTAGGTCAACCA | 20 | 1884 |
| 1065829 | 475726 | 475745 | ATCTGGTCTTGGGATTATAG | 26 | 1885 |
| 1065845 | 476159 | 476178 | CTTAGGAGTTCCTAACTCTC | 56 | 1886 |
| 1065861 | 478935 | 478954 | GTTTTGGAGATTGTGTTACG | 57 | 1887 |
| 1065877 | 480733 | 480752 | GGAGCCAGGTAGAGTTAACG | 41 | 1888 |
| 1065893 | 482489 | 482508 | GGATAGTTGTGAACAACTTC | 70 | 1889 |
| 1065909 | 483839 | 483858 | CATTGAATGAGGGCCCAAAC | 77 | 1890 |
| 1065924 | 484241 | 484260 | GGACTTGTCTTATGGCTGCC | N.D. | 1891 |
| 1065940 | 485829 | 485848 | TGATTATTCAGAGAACTACG | 47 | 1892 |
| 1065956 | 487697 | 487716 | CGTTGGCATTTAAGTCTGAG | 35 | 1893 |
| 1065972 | 489491 | 489510 | CTGGGTTGAGACTATTCAGG | 64 | 1894 |
| 1065988 | 489844 | 489863 | CCATTGAAGAAAAACCCGCG | 52 | 1895 |
| 1066004 | 494452 | 494471 | GCACTACTGTAAGGGTCATG | 48 | 1896 |
| 1066020 | 497158 | 497177 | ACAAGGGTAGTGTTACACTG | 42 | 1897 |
| 1066036 | 499081 | 499100 | CAATGGTAATCGCATATACT | 53 | 1898 |
| 1066052 | 500210 | 500229 | GACTAATCCTCTTAAGTTCA | 45 | 1899 |
| 1066068 | 500689 | 500708 | AGGTACTGTAAGCCCTTTGC | 80 | 1900 |
| 1066084 | 500972 | 500991 | AACTTTTACACGCTAGTGGG | 68 | 1901 |
| 1066100 | 501490 | 501509 | CCCTTTGTTCATACTGAACG | 69 | 1902 |
| 1066116 | 501913 | 501932 | AGCTTCCCTCCAACGAGTGA | 78 | 1903 |
| 1066132 | 502433 | 502452 | GGCCCAAGGGAATTGATGCA | 45 | 1904 |
| 1066148 | 502766 | 502785 | AGGAATAGGCACTTCGGGCA | 58 | 1905 |
| 1066164 | 503051 | 503070 | GGAACCCAGGATTTAGGTGC | 50 | 1906 |
| 1066180 | 503368 | 503387 | GGTCATAGGAGTGTTAGCCC | 44 | 1907 |
| 1066196 | 503900 | 503919 | GGTTGGATTGCTTTATTGCA | 85 | 1908 |
| 1066212 | 504299 | 504318 | GCCTGCTCTCATGTGAGAGT | 47 | 1909 |
| 1066228 | 504644 | 504663 | CGCTTGGCTGACATTTAGGG | 38 | 1910 |
| 1066244 | 505169 | 505188 | ACCGAGCTCAAGAACTGTGA | 59 | 1911 |
| 1066260 | 505670 | 505689 | TGGCCTGCTTATTGCAGGCC | 73 | 1912 |
| 1066276 | 506047 | 506066 | GTTTTCAGTTGAGAACGGTA | 41 | 1913 |
| 1066292 | 506493 | 506512 | GGGACCTCCTTATATTCACC | 35 | 1914 |
| 1066308 | 506833 | 506852 | CCCCTGCTTTAGGATGGTGT | 134 | 1915 |
| 1066324 | 507637 | 507656 | GGTCCCCCCAGAAGGCTTGA | 56 | 1916 |
| 1066340 | 508118 | 508137 | TATTCTTACCGTCTTTAGGA | 39 | 1917 |
| 1066356 | 508640 | 508659 | GGATGGAGCTGTTGTGGCAT | 57 | 1918 |
| 1066372 | 509076 | 509095 | GCATTACCCTACAATGCATA | 84 | 1919 |
| 1066388 | 510035 | 510054 | GCATTTGAGAGTTATACACG | 33 | 1920 |
| 1066404 | 510596 | 510615 | GGGCCTTATAGACCATACCA | 65 | 1921 |
| 1066420 | 510844 | 510863 | GGAGACAATCTAGTTAGACC | 30 | 1922 |
| 1066436 | 511673 | 511692 | GCACAAATGGACTGCCGGCC | 89 | 1923 |
| 1066452 | 511964 | 511983 | GAGAGTCATACTCCTGACAG | 53 | 1924 |

TABLE 28
Reduction of UBE3A-ATS RNA by 7,000 nM 5-10-5 MOE gapmers with mixed
PO/PS internucleoside linkages in vitro (37,000 cells/well)

| | SEQ ID | SEQ ID | | UBE3A- | |
|---|---|---|---|---|---|
| Compound | NO: 1 | NO: 1 | | ATS | SEQ ID |
| Number | Start Site | Stop Site | Sequence (5′ to 3′) | (% UTC)) | NO |
| 617557 | 483977 | 483996 | ATCATGTGCATACCCAGGGT | 24 | 172 |
| 749882 | 460115 | 460134 | ACTTTATAGTGTGGATGGTA | 27 | 586 |
| 750519 | 349103# | 349122# | GTCATCACCTCTCTTCAGGA | 7 | 181 |
| 1065262 | 430574 | 430593 | CTCCGGGCTCACCACCTGGT | 82 | 1925 |
| 1065278 | 433033 | 433052 | TCTATACACTGCTGTTGACG | 52 | 1926 |
| 1065294 | 441732 | 441751 | GCTTGCTAAACCTGTCCATT | 40 | 1927 |
| 1065310 | 442717 | 442736 | CTGGATGGTATAAATTGCCC | 43 | 1928 |
| 1065326 | 443811 | 443830 | GTTGCCGCTTTGGTGAACCT | 69 | 1929 |
| 1065342 | 445129 | 445148 | GTGCACTGATACAGTTGGGC | 31 | 1930 |
| 1065358 | 446360 | 446379 | CCATCAAGTAGGCCAGTCAC | 37 | 1931 |
| 1065374 | 446952 | 446971 | GGAATAACCCATACCCCCCA | 97 | 1932 |
| 1065390 | 447883 | 447902 | GCATGACTCCTAATTGCTGT | 59 | 1933 |
| 1065406 | 448539 | 448558 | GAGCTCAGTCTTCACTAGTT | 46 | 1934 |
| 1065422 | 448919 | 448938 | GTCAGGCACCAGATTGCTCA | 70 | 1935 |
| 1065438 | 449442 | 449461 | ATGATCATACTGGAGCCAGG | 8 | 1936 |
| 1065454 | 449875 | 449894 | ACCTACCAGAGTGGCATCCT | 47 | 1937 |
| 1065470 | 452250 | 452269 | ACGCTGTGTGAATCAAAAGC | 85 | 1938 |
| 1065486 | 453211 | 453230 | AGTGTTCTTACATCCACCGT | 62 | 1939 |
| 1065502 | 454279 | 454298 | CATGCCAATCGCATGCAAGC | 71 | 1940 |
| 1065518 | 454967 | 454986 | GTCAGGAGTTAACTATGAAC | 95 | 1941 |
| 1065534 | 455326 | 455345 | CACCAGTTAGGCCTGCTCCG | 94 | 1942 |
| 1065550 | 456651 | 456670 | CGTTTCCACAGCCAGGCTTA | 83 | 1943 |
| 1065566 | 456921 | 456940 | AGTCTTGGGTCACTAGGCAC | 81 | 1944 |
| 1065582 | 457908 | 457927 | CCAATATTTTGACTAGTTCG | 23 | 1945 |
| 1065598 | 458568 | 458587 | TTTAGTATGTCGAGAACTCA | 31 | 1946 |
| 1065614 | 459652 | 459671 | TGAAACCTGTATAGTTTACC | 70 | 1947 |
| 1065630 | 460652 | 460671 | CTAACCATAGACAGAGTGCA | 33 | 1948 |
| 1065645 | 461463 | 461482 | CATCATGATCTTGGTAAGGC | 18 | 1949 |
| 1065661 | 461898 | 461917 | GACCCCACAATTTGGTCCCA | 62 | 1950 |
| 1065676 | 463668 | 463687 | GACTATCTCAGCACTAGGGA | 26 | 1951 |
| 1065691 | 464558 | 464577 | GCCCTGTAGTATGTGGATAC | 46 | 1952 |
| 1065706 | 465231 | 465250 | CTCGGGTATATAAATTAATG | 43 | 1953 |
| 1065722 | 465480 | 465499 | GGATCTAGAATGATTGGTTG | 75 | 1954 |
| 1065738 | 466218 | 466237 | GGGCTGCTGTTTGAGTCCCC | 65 | 1955 |
| 1065754 | 466397 | 466416 | AGATACTCACTCGCTTTTCA | 20 | 1956 |
| 1065770 | 467416 | 467435 | ACGCTCCTTCATTTCATGCA | 46 | 1957 |
| 1065786 | 468925 | 468944 | GCTGTAAGTATAGATGCCTC | 35 | 1958 |
| 1065802 | 472661 | 472680 | ATTAGTTGACTCTATAAACG | 70 | 1959 |
| 1065818 | 474805 | 474824 | AAGTTTGGTATTGACACCTC | 36 | 1960 |
| 1065834 | 475858 | 475877 | CTTGATATAAGGGTAATACG | 58 | 1961 |
| 1065850 | 476393 | 476412 | GGCTCAGGCAAAGTAGCTTC | 93 | 1962 |
| 1065866 | 479584 | 479603 | GCCATCTTCAAGACTAAGGT | 50 | 1963 |
| 1065882 | 480932 | 480951 | CGAAAAATAGTATGCGAAGC | 32 | 1964 |
| 1065898 | 482792 | 482811 | GGAGACCCTAAAAAACCCGT | 67 | 1965 |
| 1065914 | 483913 | 483932 | CCTATAGGTGGCCTTCAGTC | 30 | 1966 |
| 1065929 | 484322 | 484341 | GGCAAGCCCAGACTCATGCT | 86 | 1967 |
| 1065945 | 486491 | 486510 | CGTCAACACTATAGATGAAT | 40 | 1968 |
| 1065961 | 488332 | 488351 | CCACTCATGTACATGAGATC | 44 | 1969 |
| 1065977 | 489547 | 489566 | GGCAAGCAACTATGGGTGGA | 26 | 1970 |
| 1065993 | 493198 | 493217 | GTTTACTTCGGGCCAGGTCC | 97 | 1971 |
| 1066009 | 495221 | 495240 | ACCCCTAGGAATAATGTTGC | 36 | 1972 |
| 1066025 | 497750 | 497769 | AGCGATACAAACCTACGCCA | 71 | 1973 |
| 1066041 | 499146 | 499165 | GGCAAGTTTTTATCGCTTAA | 48 | 1974 |
| 1066057 | 500425 | 500444 | AGTATTTTAGCCGGGATACG | 53 | 1975 |
| 1066073 | 500846 | 500865 | ACGGGTTCCTATTTGTCAGG | 54 | 1976 |
| 1066089 | 501208 | 501227 | GTGAGCTTTACTCTGCAATA | 31 | 1977 |
| 1066105 | 501601 | 501620 | GCCTTATTGGAGAGAGAACT | 91 | 1978 |
| 1066121 | 502134 | 502153 | TCAGTGCTACCCATTAGACC | 35 | 1979 |
| 1066137 | 502512 | 502531 | CATACATGGAGGAGTCCCTG | 59 | 1980 |
| 1066153 | 502809 | 502828 | TCCTAAGGATGTAGCCCATC | 55 | 1981 |
| 1066169 | 503123 | 503142 | CGCATCCAGTTAATCTCTGA | 84 | 1982 |
| 1066185 | 503437 | 503456 | GTCCCAGTTGGATTAAGGTG | 64 | 1983 |
| 1066201 | 503970 | 503989 | CTGTACAGGAGGGTGTCTCT | N.D. | 1984 |
| 1066217 | 504426 | 504445 | TAGTCTAAGGCAGTCAGGGT | 28 | 1985 |
| 1066233 | 504757 | 504776 | ATCTAGACTCTGCCTGGTTA | 51 | 1986 |
| 1066249 | 505218 | 505237 | GGACACTCTCGCTGAGGACA | 21 | 1987 |
| 1066265 | 505800 | 505819 | GGCACTATGACCACAGGGTA | 35 | 1988 |
| 1066281 | 506127 | 506146 | TCTGCTCTGTTAGCCGAGCA | 77 | 1989 |
| 1066297 | 506641 | 506660 | GCACAATGCTTGTATGCCCC | 57 | 1990 |
| 1066313 | 507239 | 507258 | GTGCCCTTACTGTTAAATCC | 48 | 1991 |
| 1066329 | 507766 | 507785 | TTTGCTCAGGATCGCTGGCC | 93 | 1992 |
| 1066345 | 508230 | 508249 | AGCCTCTGCCTAAAGGTAGT | 64 | 1993 |
| 1066361 | 508780 | 508799 | CGTGATTGCAAAGTCCAAGG | 47 | 1994 |
| 1066377 | 509247 | 509266 | CAGTAGTGGTATCAAATCTG | 36 | 1995 |
| 1066393 | 510133 | 510152 | TCCAGCACATAGACCATAGC | 60 | 1996 |
| 1066409 | 510676 | 510695 | GGTGGAAAGTCTAGTATGTC | 73 | 1997 |
| 1066425 | 511077 | 511096 | GACCCATGGAAAGACTCGGG | 119 | 1998 |
| 1066441 | 511737 | 511756 | GTTTCCCATAGGCCACGCTG | 81 | 1999 |

TABLE 29
Reduction of UBE3A-ATS RNA by 7,000 nM 5-10-5 MOE gapmers
with mixed PO/PS internucleoside linkages in vitro
(37,000 cells/well)

| | SEQ ID | SEQ ID | | UBE3A- | |
|---|---|---|---|---|---|
| Compound | NO: 1 | NO: 1 | | ATS | SEQ ID |
| Number | Start Site | Stop Site | Sequence (5′ to 3′) | (% UTC)) | NO |
| 617557 | 483977 | 483996 | ATCATGTGCATACCCAGGGT | 35 | 172 |
| 749882 | 460115 | 460134 | ACTTTATAGTGTGGATGGTA | 26 | 586 |
| 749935 | 463695 | 463714 | AGTGGTTGCTATCCTGCTAA | 65 | 2000 |
| 750519 | 349103* | 349122* | GTCATCACCTCTCTTCAGGA | 16 | 181 |
| 1065263 | 430586 | 430605 | ACGCAAGTCCTCCTCCGGGC | 73 | 2001 |
| 1065279 | 433138 | 433157 | TCAAGGGAACTAACTCCTCC | 91 | 2002 |
| 1065295 | 441764 | 441783 | GATTGATCATGTTATGCCCT | 34 | 2003 |
| 1065311 | 442754 | 442773 | GGTGGATTGGAGTTGCTACA | 74 | 2004 |
| 1065327 | 443823 | 443842 | TGGGACACATATGTTGCCGC | 81 | 2005 |
| 1065343 | 445173 | 445192 | CTGAAGCAAAGCTTATAGGC | 91 | 2006 |
| 1065359 | 446483 | 446502 | TGACACTGAGTAATCTGCGA | 71 | 2007 |
| 1065375 | 446994 | 447013 | TGTAAGATTCCCCCAAGGGT | 103 | 2008 |
| 1065391 | 447907 | 447926 | GGTGGGATTACATCTCTTAT | 97 | 2009 |
| 1065407 | 448582 | 448601 | CGTGATATTCATGTTGTCTG | 89 | 2010 |
| 1065423 | 448947 | 448966 | CGAAGCCAAAGGTACTTGAG | 100 | 2011 |
| 1065439 | 449461 | 449480 | GCTTGCACTCCATCATATAA | 126 | 2012 |
| 1065455 | 449988 | 450007 | AGGACCAGCCAGTCTAGTTT | 47 | 2013 |
| 1065471 | 452256 | 452275 | GGTCTCACGCTGTGTGAATC | 90 | 2014 |
| 1065487 | 453229 | 453248 | GGAGTCAAGTTGGTTAATAG | 136 | 2015 |
| 1065503 | 454339 | 454358 | GGGCGAAAGTATATCAGGCA | N.D. | 2016 |
| 1065519 | 455012 | 455031 | GGCTGTCAATGCTGATATAT | 82 | 2017 |
| 1065535 | 455332 | 455351 | GGAGTTCACCAGTTAGGCCT | 88 | 2018 |
| 1065551 | 456669 | 456688 | ACCCTCCCAACAAATAAGCG | 160 | 2019 |
| 1065567 | 456925 | 456944 | AGCAAGTCTTGGGTCACTAG | 72 | 2020 |
| 1065583 | 457969 | 457988 | GGCATCAATCAACAAGCACC | 49 | 2021 |
| 1065599 | 458570 | 458589 | GCTTTAGTATGTCGAGAACT | 19 | 2022 |
| 1065615 | 460105 | 460124 | GTGGATGGTATCCTGGTCAA | 46 | 2023 |
| 1065631 | 460660 | 460679 | GCATGATTCTAACCATAGAC | 31 | 2024 |
| 1065646 | 461468 | 461487 | GTACTCATCATGATCTTGGT | 26 | 2025 |
| 1065662 | 462030 | 462049 | GGAATAGGGCTCTGCTTATT | 60 | 2026 |
| 1065692 | 464776 | 464795 | CCTCGAGGATAGTTTCACTG | 76 | 2027 |
| 1065707 | 465234 | 465253 | CATCTCGGGTATATAAATTA | 77 | 2028 |
| 1065723 | 465484 | 465503 | TGTTGGATCTAGAATGATTG | 71 | 2029 |
| 1065739 | 466222 | 466241 | GTATGGGCTGCTGTTTGAGT | 55 | 2030 |
| 1065755 | 466403 | 466422 | CTGCAGAGATACTCACTCGC | 55 | 2031 |
| 1065771 | 467421 | 467440 | TTGATACGCTCCTTCATTTC | 75 | 2032 |
| 1065787 | 468927 | 468946 | ATGCTGTAAGTATAGATGCC | 86 | 2033 |
| 1065803 | 472669 | 472688 | CGTTGAATATTAGTTGACTC | 74 | 2034 |
| 1065819 | 474875 | 474894 | GGTGTTGTATGATAATGTGT | 72 | 2035 |
| 1065835 | 475935 | 475954 | CAATAGTAGTGATGACTTCC | 41 | 2036 |
| 1065851 | 476439 | 476458 | AGATGGAGCTTGAGCCATCC | 76 | 2037 |
| 1065867 | 479607 | 479626 | GCCCCACAGTAGAAATGTGG | 87 | 2038 |
| 1065883 | 481338 | 481357 | AGTCAACAAGACAACTCGAT | 62 | 2039 |
| 1065899 | 482839 | 482858 | CGTTATTCAGTCTCAGGGAG | 28 | 2040 |
| 1065915 | 483919 | 483938 | CTTTCACCTATAGGTGGCCT | 67 | 2041 |
| 1065930 | 484442 | 484461 | GAGTAATGGACTTCTGGTCT | 133 | 2042 |
| 1065946 | 486772 | 486791 | GTGTGAGGGAATCTAAGATC | 54 | 2043 |
| 1065962 | 488566 | 488585 | GGTGCCACACCATCAAAAGA | 63 | 2044 |
| 1065978 | 489581 | 489600 | GCTGCAGTGGTACCACAGAC | 91 | 2045 |
| 1065994 | 493203 | 493222 | AAGAAGTTTACTTCGGGCCA | 59 | 2046 |
| 1066010 | 495383 | 495402 | TCGGGAGTTGTTAGTCCAAG | 62 | 2047 |
| 1066026 | 497873 | 497892 | GCTCCCAAACAACTAATAGT | 76 | 2048 |
| 1066042 | 499204 | 499223 | TCAAAATCACGAAAGGCGGG | 71 | 2049 |
| 1066058 | 500430 | 500449 | TTAGAAGTATTTTAGCCGGG | 44 | 2050 |
| 1066074 | 500857 | 500876 | GGTAGGTAACTACGGGTTCC | 59 | 2051 |
| 1066090 | 501222 | 501241 | CACCCCTGTAAACAGTGAGC | 96 | 2052 |
| 1066106 | 501609 | 501628 | CTGCTCAAGCCTTATTGGAG | 120 | 2053 |
| 1066122 | 502140 | 502159 | GTGGAATCAGTGCTACCCAT | 77 | 2054 |
| 1066138 | 502527 | 502546 | AGCTGGGCACTCATACATAC | 55 | 2055 |
| 1066154 | 502813 | 502832 | AGCCTCCTAAGGATGTAGCC | 108 | 2056 |
| 1066170 | 503131 | 503150 | ATGGTCCTCGCATCCAGTTA | 54 | 2057 |
| 1066186 | 503444 | 503463 | CAGCACTGTCCCAGTTGGAT | 61 | 2058 |
| 1066202 | 503986 | 504005 | GTTGATTCACTGCACACTGT | 80 | 2059 |
| | 508752 | 508771 | | | |
| 1066218 | 504433 | 504452 | GGTATATTAGTCTAAGGCAG | 43 | 2060 |
| 1066234 | 504789 | 504808 | GCGAAGCCTTCTCAAAGACT | 92 | 2061 |
| 1066250 | 505323 | 505342 | GGGCCGCCTCTGTTATTGTG | 88 | 2062 |
| 1066266 | 505808 | 505827 | GAACTGTGGGCACTATGACC | 86 | 2063 |
| 1066282 | 506165 | 506184 | CCTTTGGAGCTTTGACTGGC | 76 | 2064 |
| 1066298 | 506677 | 506696 | CGATTTCCTGCCAGTGGCTG | 79 | 2065 |
| 1066314 | 507244 | 507263 | CTACTGTGCCCTTACTGTTA | 83 | 2066 |
| 1066330 | 507795 | 507814 | GAAGACTTAGGTCTCAAGCT | 62 | 2067 |
| 1066346 | 508274 | 508293 | GTAGTCATGTAGAACAGCAC | 78 | 2068 |
| 1066362 | 508784 | 508803 | CCACCGTGATTGCAAAGTCC | 69 | 2069 |
| 1066378 | 509252 | 509271 | GGGCACAGTAGTGGTATCAA | 22 | 2070 |
| 1066394 | 510203 | 510222 | AGAGCTGTCCTAAGGCAATT | 54 | 2071 |
| 1066410 | 510711 | 510730 | CTTGACATACAGGATAGGTG | 52 | 2072 |
| 1066426 | 511088 | 511107 | TTGGTAAATTAGACCCATGG | 110 | 2073 |
| 1066442 | 511744 | 511763 | GATGTATGTTTCCCATAGGC | 56 | 2074 |

TABLE 30
Reduction of UBE3A-ATS RNA by 8,000 nM 5-10-5 MOE gapmers
with mixed PO/PS internucleoside linkages in vitro
(20,000 cells/well)

| | SEQ ID | SEQ ID | | UBE3A- | |
|---|---|---|---|---|---|
| Compound | NO: 1 | NO: 1 | | ATS | SEQ ID |
| Number | Start Site | Stop Site | Sequence (5′ to 3′) | (% UTC)) | NO |
| 617557 | 483977 | 483996 | ATCATGTGCATACCCAGGGT | 51 | 172 |
| 749882 | 460115 | 460134 | ACTTTATAGTGTGGATGGTA | 46 | 586 |
| 750519 | 349103* | 349122* | GTCATCACCTCTCTTCAGGA | 28 | 181 |
| 1165442 | 449002 | 449021 | AGGTCTTATTTACCATTGGC | 72 | 2377 |
| 1165447 | 449444 | 449463 | TAATGATCATACTGGAGCCA | 87 | 2378 |
| 1165449 | 452253 | 452272 | CTCACGCTGTGTGAATCAAA | 101 | 2379 |
| 1165455 | 452265 | 452284 | GGAAGTCTAGGTCTCACGCT | 88 | 2380 |
| 1165467 | 453362 | 453381 | CTACATAGGCACTCTACTAG | 96 | 2381 |
| 1165471 | 454154 | 454173 | ACCCTTATGGAGACTTATAT | 96 | 2382 |
| 1165477 | 454461 | 454480 | GACTCCACACACCTACTAGA | 97 | 2383 |
| 1165483 | 454578 | 454597 | CAAGCAAAGACTACACCGTG | 106 | 2384 |
| 1165487 | 454848 | 454867 | TATCCAGGGTAGAAGACTAG | 83 | 2385 |
| 1165493 | 454861 | 454880 | GGTGTATATTCCCTATCCAG | 89 | 2386 |
| 1165499 | 455020 | 455039 | AGTGGGATGGCTGTCAATGC | 82 | 2387 |
| 1165510 | 220439 | 220458 | AGGGATCCCCAAATAGAGCC | 96 | 2388 |
| | 456808 | 456827 | | | |
| 1165516 | 457018 | 457037 | TCACAGTTGCTTGACCCTTA | 79 | 2389 |
| 1165522 | 457572 | 457591 | TATGAACCATGGAGTCTCTA | 69 | 2390 |
| 1165528 | 458791 | 458810 | TCCCTAATATAGGGCAGATG | 88 | 2391 |
| 1165534 | 458942 | 458961 | TATAGGACCTCAGGAGATTG | 52 | 2392 |
| 1165539 | 458950 | 458969 | TCAAGACCTATAGGACCTCA | 37 | 2393 |
| 1165546 | 459550 | 459569 | AAAGACTATCCTGGTATGAC | 65 | 2394 |
| 1165557 | 460735 | 460754 | GATTTGAGCCTGCTATGTCT | 16* | 2395 |
| 1165565 | 461525 | 461544 | ACATTCAGCTAGACTAGTTG | 58 | 2396 |
| 1165570 | 461901 | 461920 | TGAGACCCCACAATTTGGTC | 89 | 2397 |
| 1165572 | 464385 | 464404 | TAGGTAGTTCACAACTCTTC | 68 | 2398 |
| 1165582 | 464562 | 464581 | ATATGCCCTGTAGTATGTGG | 77 | 2399 |
| 1165587 | 465245 | 465264 | ATTTTATTGGTCATCTCGGG | 47 | 2400 |
| 1165592 | 465387 | 465406 | TGTCAGACTTATTGAGGATG | 67 | 2401 |
| 1165594 | 465891 | 465910 | ACTCCCACAAGGTACTCTTG | 84 | 2402 |
| 1165598 | 466249 | 466268 | AACTGGTAGGATCTATGGCA | 40 | 2403 |
| 1165603 | 467301 | 467320 | TTCACAGAGTAGTCTATTGG | 84 | 2404 |
| 1165609 | 468352 | 468371 | TGTAGTATGCATTGACAAGC | 58 | 2405 |
| 1165612 | 482161 | 482180 | GAGTTACAAGTGTCATATAC | 48 | 2406 |
| 1165618 | 483960 | 483979 | GGTAGGATTCATGGTCCAAA | 64 | 2407 |
| 1165625 | 485656 | 485675 | CCTAGGACCAGTTGGTTCAC | 99 | 2408 |
| 1165633 | 489492 | 489511 | ACTGGGTTGAGACTATTCAG | 68 | 2409 |
| 1165638 | 489521 | 489540 | CAATGGACCACCTAAGACCT | 104 | 2410 |
| 1165641 | 493854 | 493873 | CTAATCTATGCTGGGCCCCA | 89 | 2411 |
| 1165647 | 493864 | 493883 | GAGATTAGGCCTAATCTATG | 116 | 2412 |
| 1165653 | 496830 | 496849 | ATTAGGTATGGAGGCCATGT | 69 | 2413 |
| 1165664 | 499674 | 499693 | AAGGTAGCCCCAATACAGAT | 87 | 2414 |
| 1165668 | 500690 | 500709 | GAGGTACTGTAAGCCCTTTG | 115 | 2415 |
| 1165673 | 500906 | 500925 | GTTTTGACCTAACTGGCCTT | 86 | 2416 |
| 1165678 | 501567 | 501586 | CTAAGGAGTGCTCTTTGTGG | 59 | 2417 |
| 1165684 | 502371 | 502390 | AGGTATTAAGGCCCTTGGCC | 95 | 2418 |
| 1165690 | 502378 | 502397 | GTATACAAGGTATTAAGGCC | 69 | 2419 |
| 1165695 | 502449 | 502468 | TAGGCAGCTCTTTGTAGGCC | 82 | 2420 |
| 1165701 | 503155 | 503174 | AGTTCTGTATACACCATCCC | 51 | 2421 |
| 1165707 | 503361 | 503380 | GGAGTGTTAGCCCAGGTGAT | 95 | 2422 |
| 1165713 | 503367 | 503386 | GTCATAGGAGTGTTAGCCCA | 84 | 2423 |
| 1165719 | 503421 | 503440 | GGTGATGACACCCCTACCAT | 106 | 2424 |
| 1165725 | 503507 | 503526 | GCCTTGGTTGTGGTGAAACC | 64 | 2425 |
| 1165729 | 504076 | 504095 | GTGAACTCCTGTGACTGATA | 52 | 2426 |
| 1165736 | 504431 | 504450 | TATATTAGTCTAAGGCAGTC | 47 | 2427 |
| 1165747 | 505173 | 505192 | GTGTACCGAGCTCAAGAACT | 51 | 2428 |
| 1165753 | 505181 | 505200 | CTGTCTCTGTGTACCGAGCT | 64 | 2429 |
| 1165766 | 505320 | 505339 | CCGCCTCTGTTATTGTGATA | 78 | 2430 |
| 1165772 | 505327 | 505346 | AATTGGGCCGCCTCTGTTAT | 74 | 2431 |
| 1165778 | 505542 | 505561 | AGTCAGGTACAGGTGTTGGA | 56 | 2432 |
| 1165783 | 505745 | 505764 | TGTAGGTTGACAGGACATGC | 64 | 2433 |
| 1165789 | 505821 | 505840 | GAGGGTGCTTAGTGAACTGT | 87 | 2434 |
| 1165795 | 505830 | 505849 | AAGACCTGTGAGGGTGCTTA | 87 | 2435 |
| 1165800 | 506448 | 506467 | AGTCTGTCTTTAGGGTCACC | 57 | 2436 |
| 1165806 | 507907 | 507926 | TAGCCATTCGATACCTGCTT | 76 | 2437 |
| 1165812 | 507914 | 507933 | TGCAGGATAGCCATTCGATA | 75 | 2438 |
| 1165823 | 508791 | 508810 | ATGAATGCCACCGTGATTGC | 94 | 2439 |
| 1165828 | 510228 | 510247 | AGTTGTGTCTGAGGGATATC | 64 | 2440 |
| 1165839 | 448411 | 448430 | AGGGTCTTAGTGCCAAATAT | 102 | 2441 |
| 1165852 | 455763 | 455782 | TACCAAAGTGGCTGCTCACC | 76 | 2442 |
| 1165854 | 460426 | 460445 | TAGCCCTTTCAGCACACTTC | 44 | 2443 |
| 1165856 | 461342 | 461361 | CTGGCAATATGTCAACCTTA | 55 | 2444 |
| 1165864 | 464515 | 464534 | AGTGCACAGATAATGACTAG | 91 | 2445 |
| 1165880 | 484240 | 484259 | GACTTGTCTTATGGCTGCCT | 90 | 2446 |
| 1165884 | 486440 | 486459 | CCTAATAGCACCAGAATAGT | 104 | 2447 |
| 1165891 | 499666 | 499685 | CCCAATACAGATTCAGTGGC | 89 | 2448 |
| 1165901 | 504818 | 504837 | TGAAGTAGTCCTGCCCTTTC | 86 | 2449 |
| 1165902 | 505216 | 505235 | ACACTCTCGCTGAGGACACA | 74 | 2450 |
| 1165908 | 506966 | 506985 | GGGCATTCAGTGCTCCCTCC | 106 | 2451 |

TABLE 31
Reduction of UBE3A-ATS RNA by 8,000 nM 5-10-5 MOE
gapmers with mixed PO/PS internucleoside linkages in
vitro (20,000 cells/well)

| | SEQ ID | SEQ ID | | UBE3A- | |
|---|---|---|---|---|---|
| Compound | NO: 1 | NO: 1 | | ATS | SEQ ID |
| Number | Start Site | Stop Site | Sequence (5′ to 3′) | (% UTC)) | NO |
| 617557 | 483977 | 483996 | ATCATGTGCATACCCAGGGT | 53 | 172 |
| 749882 | 460115 | 460134 | ACTTTATAGTGTGGATGGTA | 50 | 586 |
| 750519 | 349103* | 349122* | GTCATCACCTCTCTTCAGGA | 31 | 181 |
| 1165439 | 448413 | 448432 | CAAGGGTCTTAGTGCCAAAT | 106 | 2452 |
| 1165444 | 449095 | 449114 | TATGCTAGTCACTCATTGAG | 113 | 2453 |
| 1165451 | 452258 | 452277 | TAGGTCTCACGCTGTGTGAA | 97 | 2454 |
| 1165457 | 452268 | 452287 | GAGGGAAGTCTAGGTCTCAC | 89 | 2455 |
| 1165468 | 453365 | 453384 | TAACTACATAGGCACTCTAC | 79 | 2456 |
| 1165473 | 454161 | 454180 | AGATTTGACCCTTATGGAGA | 115 | 2457 |
| 1165479 | 454465 | 454484 | AGTGGACTCCACACACCTAC | 108 | 2458 |
| 1165485 | 454843 | 454862 | AGGGTAGAAGACTAGCATAC | 96 | 22 |
| 1165489 | 454857 | 454876 | TATATTCCCTATCCAGGGTA | 92 | 2459 |
| 1165495 | 454865 | 454884 | GACAGGTGTATATTCCCTAT | 116 | 2460 |
| 1165505 | 456628 | 456647 | TGTGCATGGTTATCTAATGC | 74 | 2461 |
| 1165512 | 457013 | 457032 | GTTGCTTGACCCTTAATTCA | 108 | 2462 |
| 1165518 | 457022 | 457041 | CATATCACAGTTGCTTGACC | 132 | 2463 |
| 1165524 | 457984 | 458003 | TTGATCTATTATGAGGGCAT | 22 | 2464 |
| 1165530 | 458935 | 458954 | CCTCAGGAGATTGTACAACA | 47 | 2465 |
| 1165542 | 459545 | 459564 | CTATCCTGGTATGACTGTCA | 39 | 2466 |
| 1165548 | 460110 | 460129 | ATAGTGTGGATGGTATCCTG | 57 | 2467 |
| 1165553 | 460508 | 460527 | TATAGGGTGGTTGGTTCAAA | 29 | 2468 |
| 1165559 | 460844 | 460863 | ACCACACATATAGGCTAGCC | 39 | 2469 |
| 1165566 | 461527 | 461546 | GAACATTCAGCTAGACTAGT | 64 | 2470 |
| 1165574 | 464388 | 464407 | ACTTAGGTAGTTCACAACTC | 55 | 2471 |
| 1165579 | 464557 | 464576 | CCCTGTAGTATGTGGATACT | 97 | 2472 |
| 1165583 | 465239 | 465258 | TTGGTCATCTCGGGTATATA | 43 | 2473 |
| 1165589 | 465380 | 465399 | CTTATTGAGGATGGTGTGTA | 64 | 2474 |
| 1165605 | 467802 | 467821 | TCCCTCTTAGTGATTGGTGG | 80 | 2475 |
| 1165614 | 483844 | 483863 | CTAGGCATTGAATGAGGGCC | 93 | 2476 |
| 1165620 | 483962 | 483981 | AGGGTAGGATTCATGGTCCA | 95 | 2477 |
| 1165627 | 486353 | 486372 | TTAATAGACTGCGATTATAC | 100 | 2478 |
| 1165630 | 489097 | 489116 | TCCCTAAGCTTAGATATACC | 76 | 2479 |
| 1165634 | 489516 | 489535 | GACCACCTAAGACCTCAAGG | 73 | 2480 |
| 1165643 | 493860 | 493879 | TTAGGCCTAATCTATGCTGG | 84 | 2481 |
| 1165649 | 493866 | 493885 | ATGAGATTAGGCCTAATCTA | 108 | 2482 |
| 1165655 | 496832 | 496851 | AGATTAGGTATGGAGGCCAT | 85 | 2483 |
| 1165660 | 499668 | 499687 | GCCCCAATACAGATTCAGTG | 94 | 2484 |
| 1165675 | 500909 | 500928 | GGTGTTTTGACCTAACTGGC | 81 | 2485 |
| 1165680 | 501762 | 501781 | GGCTAAGAGTCACCTGTATC | 85 | 2486 |
| 1165686 | 502373 | 502392 | CAAGGTATTAAGGCCCTTGG | 92 | 2487 |
| 1165691 | 502438 | 502457 | TTGTAGGCCCAAGGGAATTG | 105 | 2488 |
| 1165696 | 502451 | 502470 | GCTAGGCAGCTCTTTGTAGG | 65 | 2489 |
| 1165703 | 503357 | 503376 | TGTTAGCCCAGGTGATCAGC | 69 | 2490 |
| 1165709 | 503363 | 503382 | TAGGAGTGTTAGCCCAGGTG | 56 | 2491 |
| 1165715 | 503370 | 503389 | AGGGTCATAGGAGTGTTAGC | 65 | 2492 |
| 1165721 | 503424 | 503443 | TAAGGTGATGACACCCCTAC | 109 | 2493 |
| 1165726 | 503871 | 503890 | GGGTCAGTTGTGCAGTTGTT | 46 | 2494 |
| 1165738 | 504434 | 504453 | AGGTATATTAGTCTAAGGCA | 49 | 2495 |
| 1165743 | 504977 | 504996 | CTATTATCTTCTTAGGGTCG | 57 | 2496 |
| 1165749 | 505175 | 505194 | CTGTGTACCGAGCTCAAGAA | 65 | 2497 |
| 1165755 | 505198 | 505217 | CATCAGCTGTTAGCAGTCTG | 82 | 2498 |
| 1165760 | 505219 | 505238 | AGGACACTCTCGCTGAGGAC | 64 | 2499 |
| 1165768 | 505322 | 505341 | GGCCGCCTCTGTTATTGTGA | 91 | 2500 |
| 1165774 | 505329 | 505348 | GAAATTGGGCCGCCTCTGTT | 91 | 2501 |
| 1165779 | 505651 | 505670 | CTAGCTTCCACCTAAGAGCT | 111 | 2502 |
| 1165785 | 505750 | 505769 | AACTCTGTAGGTTGACAGGA | 78 | 2503 |
| 1165791 | 505824 | 505843 | TGTGAGGGTGCTTAGTGAAC | 77 | 2504 |
| 1165796 | 505836 | 505855 | CTGTCAAAGACCTGTGAGGG | 78 | 2505 |
| 1165808 | 507910 | 507929 | GGATAGCCATTCGATACCTG | 101 | 2506 |
| 1165814 | 508119 | 508138 | TTATTCTTACCGTCTTTAGG | 70 | 2507 |
| 1165825 | 509129 | 509148 | AGCTCATCACAACTGGGTGG | 86 | 2508 |
| 1165842 | 449667 | 449686 | AGAGATATGATTAGTACTGG | 105 | 2509 |
| 1165850 | 455030 | 455049 | GTGATATTGCAGTGGGATGG | 89 | 2510 |
| 1165853 | 458945 | 458964 | ACCTATAGGACCTCAGGAGA | 70 | 2511 |
| 1165857 | 461416 | 461435 | ACTGGGTTACTTTCCAATAG | 61 | 2512 |
| 1165861 | 463093 | 463112 | CAATTTACTTGATACAGGGC | 43 | 2513 |
| 1165869 | 465393 | 465412 | GTCAATTGTCAGACTTATTG | 54 | 2514 |
| 1165873 | 466100 | 466119 | GGGCCTGTATGTCTTGAGAA | 88 | 2515 |
| 1165874 | 467294 | 467313 | AGTAGTCTATTGGTGTTCCT | 68 | 2516 |
| 1165876 | 468356 | 468375 | ATACTGTAGTATGCATTGAC | 79 | 2517 |
| 1165882 | 484300 | 484319 | TTACTAGGGCCAGAGAATCC | 94 | 2518 |
| 1165889 | 493623 | 493642 | CAGATGACTAGCCTCCAAAC | 102 | 2519 |
| 1165892 | 499910 | 499929 | GCATAATAGGAGGTCCTTAA | 46 | 2520 |
| 1165894 | 500764 | 500783 | GTCAAATCAATTTGTGCCAC | 72 | 2521 |
| 1165900 | 504422 | 504441 | CTAAGGCAGTCAGGGTAATG | 55 | 2522 |
| 1165905 | 506694 | 506713 | TTAAGAAGCTTGCCTTTCGA | 115 | 2523 |
| 1165909 | 507901 | 507920 | TTCGATACCTGCTTTTGTGA | 111 | 2524 |
| 1165914 | 511254 | 511273 | CTGATGATTTGTTGATTACC | 84 | 2525 |

TABLE 32
Reduction of UBE3A-ATS RNA by 8,000 nM 5-10-5 MOE gapmers
with mixed PO/PS internucleoside linkages in
vitro (20,000 cells/well)

| | SEQ ID | SEQ ID | | UBE3A- | |
|---|---|---|---|---|---|
| Compound | NO: 1 | NO: 1 | | ATS | SEQ ID |
| Number | Start Site | Stop Site | Sequence (5′ to 3′) | (% UTC)) | NO |
| 617557 | 483977 | 483996 | ATCATGTGCATACCCAGGGT | 49 | 172 |
| 749882 | 460115 | 460134 | ACTTTATAGTGTGGATGGTA | 33 | 586 |
| 750519 | 349103* | 349122* | GTCATCACCTCTCTTCAGGA | 22 | 181 |
| 1165440 | 448459 | 448478 | ATAGTGCCAGTAGGACTTAC | 98 | 2526 |
| 1165445 | 449097 | 449116 | AGTATGCTAGTCACTCATTG | 68 | 2527 |
| 1165452 | 452259 | 452278 | CTAGGTCTCACGCTGTGTGA | 84 | 2528 |
| 1165458 | 452271 | 452290 | TATGAGGGAAGTCTAGGTCT | 64 | 2529 |
| 1165474 | 454162 | 454181 | AAGATTTGACCCTTATGGAG | 96 | 2530 |
| 1165480 | 454466 | 454485 | GAGTGGACTCCACACACCTA | 80 | 2531 |
| 1165490 | 454858 | 454877 | GTATATTCCCTATCCAGGGT | 93 | 2532 |
| 1165496 | 454866 | 454885 | TGACAGGTGTATATTCCCTA | 55 | 2533 |
| 1165501 | 455031 | 455050 | AGTGATATTGCAGTGGGATG | 77 | 2534 |
| 1165506 | 220320 | 220339 | CATCATCGATCCAAACAAGC | 102 | 2535 |
| | 456689 | 456708 | | | |
| 1165513 | 457015 | 457034 | CAGTTGCTTGACCCTTAATT | 76 | 2536 |
| 1165519 | 457364 | 457383 | ACATGGTGAGGGTCTCAATG | 33 | 2537 |
| 1165525 | 457986 | 458005 | ACTTGATCTATTATGAGGGC | 35 | 2538 |
| 1165531 | 458936 | 458955 | ACCTCAGGAGATTGTACAAC | 42 | 2539 |
| 1165536 | 458947 | 458966 | AGACCTATAGGACCTCAGGA | 28 | 2540 |
| 1165543 | 459546 | 459565 | ACTATCCTGGTATGACTGTC | 40 | 2541 |
| 1165549 | 460112 | 460131 | TTATAGTGTGGATGGTATCC | 49 | 2542 |
| 1165554 | 460509 | 460528 | TTATAGGGTGGTTGGTTCAA | 24 | 2543 |
| 1165560 | 460845 | 460864 | TACCACACATATAGGCTAGC | 43 | 2544 |
| 1165567 | 461671 | 461690 | CCTAAGGTGAAGTCTGTGTA | 58 | 2545 |
| 1165575 | 464389 | 464408 | CACTTAGGTAGTTCACAACT | 59 | 2546 |
| 1165580 | 464559 | 464578 | TGCCCTGTAGTATGTGGATA | 69 | 2547 |
| 1165584 | 465241 | 465260 | TATTGGTCATCTCGGGTATA | 51 | 2548 |
| 1165595 | 466246 | 466265 | TGGTAGGATCTATGGCAGTT | 35 | 2549 |
| 1165600 | 467297 | 467316 | CAGAGTAGTCTATTGGTGTT | 83 | 2550 |
| 1165606 | 467803 | 467822 | CTCCCTCTTAGTGATTGGTG | 84 | 2551 |
| 1165610 | 468403 | 468422 | CCTACCCTTGCATGCTATGT | 88 | 2552 |
| 1165615 | 483850 | 483869 | GCCTGACTAGGCATTGAATG | 79 | 2553 |
| 1165622 | 484301 | 484320 | GTTACTAGGGCCAGAGAATC | 105 | 2554 |
| 1165628 | 486354 | 486373 | GTTAATAGACTGCGATTATA | 43 | 2555 |
| 1165631 | 489098 | 489117 | CTCCCTAAGCTTAGATATAC | 88 | 2556 |
| 1165635 | 489518 | 489537 | TGGACCACCTAAGACCTCAA | 73 | 139 |
| 1165644 | 493861 | 493880 | ATTAGGCCTAATCTATGCTG | 89 | 2557 |
| 1165650 | 493868 | 493887 | AGATGAGATTAGGCCTAATC | 136 | 2558 |
| 1165656 | 496834 | 496853 | ACAGATTAGGTATGGAGGCC | 57 | 2559 |
| 1165661 | 499670 | 499689 | TAGCCCCAATACAGATTCAG | 55 | 2560 |
| 1165666 | 499911 | 499930 | TGCATAATAGGAGGTCCTTA | 54 | 2561 |
| 1165670 | 500864 | 500883 | TACTTTTGGTAGGTAACTAC | 70 | 2562 |
| 1165676 | 500910 | 500929 | AGGTGTTTTGACCTAACTGG | 80 | 2563 |
| 1165681 | 501764 | 501783 | TGGGCTAAGAGTCACCTGTA | 109 | 2564 |
| 1165687 | 502374 | 502393 | ACAAGGTATTAAGGCCCTTG | 106 | 2565 |
| 1165692 | 502439 | 502458 | TTTGTAGGCCCAAGGGAATT | 119 | 2566 |
| 1165697 | 502740 | 502759 | GCCCGATGACACCAGCCACT | 61 | 2567 |
| 1165704 | 503358 | 503377 | GTGTTAGCCCAGGTGATCAG | 66 | 2568 |
| 1165710 | 503364 | 503383 | ATAGGAGTGTTAGCCCAGGT | 62 | 2569 |
| 1165716 | 503418 | 503437 | GATGACACCCCTACCATGGC | 63 | 2570 |
| 1165722 | 503425 | 503444 | TTAAGGTGATGACACCCCTA | 102 | 2571 |
| 1165727 | 503873 | 503892 | AAGGGTCAGTTGTGCAGTTG | 43 | 2572 |
| 1165733 | 504427 | 504446 | TTAGTCTAAGGCAGTCAGGG | 50 | 2573 |
| 1165739 | 504435 | 504454 | TAGGTATATTAGTCTAAGGC | 50 | 2574 |
| 1165744 | 505167 | 505186 | CGAGCTCAAGAACTGTGACT | 65 | 2575 |
| 1165750 | 505176 | 505195 | TCTGTGTACCGAGCTCAAGA | 41 | 2576 |
| 1165756 | 505199 | 505218 | ACATCAGCTGTTAGCAGTCT | 45 | 2577 |
| 1165761 | 505220 | 505239 | GAGGACACTCTCGCTGAGGA | 78 | 2578 |
| 1165769 | 505324 | 505343 | TGGGCCGCCTCTGTTATTGT | 79 | 2579 |
| 1165775 | 505331 | 505350 | TAGAAATTGGGCCGCCTCTG | 63 | 2580 |
| 1165780 | 505652 | 505671 | CCTAGCTTCCACCTAAGAGC | 78 | 2581 |
| 1165786 | 505751 | 505770 | GAACTCTGTAGGTTGACAGG | 43 | 2582 |
| 1165792 | 505826 | 505845 | CCTGTGAGGGTGCTTAGTGA | 76 | 2583 |
| 1165797 | 506166 | 506185 | ACCTTTGGAGCTTTGACTGG | 90 | 2584 |
| 1165804 | 507902 | 507921 | ATTCGATACCTGCTTTTGTG | 95 | 2585 |
| 1165809 | 507911 | 507930 | AGGATAGCCATTCGATACCT | 70 | 2586 |
| 1165837 | 511896 | 511915 | AAGTGAACTACTTGGAGACC | 38 | 2587 |
| 1165843 | 449698 | 449717 | TGTATGGCTTATGCATGCTA | 75 | 2588 |
| 1165847 | 453368 | 453387 | TATTAACTACATAGGCACTC | 58 | 2589 |
| 1165848 | 454844 | 454863 | CAGGGTAGAAGACTAGCATA | 109 | 2590 |
| 1165858 | 461430 | 461449 | TTAGCACTTCTATAACTGGG | 40 | 2591 |
| 1165862 | 463776 | 463795 | ATAGATTGGGCTTTAGAGGT | 45 | 2592 |
| 1165867 | 465383 | 465402 | AGACTTATTGAGGATGGTGT | 47 | 2593 |
| 1165870 | 465563 | 465582 | TAGGACAAGTCTTATAGAGA | 48 | 2594 |
| 1165878 | 483974 | 483993 | ATGTGCATACCCAGGGTAGG | 58 | 2595 |
| 1165890 | 493850 | 493869 | TCTATGCTGGGCCCCAATTC | 87 | 2596 |
| 1165906 | 506772 | 506791 | AGGTTGTGGAGGTTGTTCCT | 72 | 2597 |
| 1165911 | 508171 | 508190 | ACCTGCAGTTATTTAGCCAT | 68 | 2598 |
| 1165912 | 509171 | 509190 | AACCTCCAAGTGCTTCAAGC | 60 | 2599 |

TABLE 33
Reduction of UBE3A-ATS RNA by 8,000 nM 5-10-5 MOE
gapmers with mixed PO/PS internucleoside linkages in
vitro (20,000 cells/well)

| | SEQ ID | SEQ ID | | UBE3A- | |
|---|---|---|---|---|---|
| Compound | NO: 1 | NO: 1 | | ATS | SEQ ID |
| Number | Start Site | Stop Site | Sequence (5′ to 3′) | (% UTC)) | NO |
| 1065438 | 449442 | 449461 | ATGATCATACTGGAGCCAGG | 95 | 1936 |
| 1165509 | 220406 | 220425 | CTTATTTGTCCTATTGGAGG | 91 | 2600 |
| | 456775 | 456794 | | | |
| 1178377 | 220315 | 220334 | TCGATCCAAACAAGCACCCT | 98 | 2601 |
| | 456684 | 456703 | | | |
| 1178379 | 220318 | 220337 | TCATCGATCCAAACAAGCAC | 132 | 2602 |
| | 456687 | 456706 | | | |
| 1178384 | 456753 | 456772 | CGCACATCTGGACCTCAGAT | 98 | 2603 |
| 1178386 | 456755 | 456774 | GCCGCACATCTGGACCTCAG | 129 | 2604 |
| 1178388 | 456758 | 456777 | AGGGCCGCACATCTGGACCT | 115 | 2605 |
| 1178390 | 456760 | 456779 | GGAGGGCCGCACATCTGGAC | 70 | 2606 |
| 1178392 | 456762 | 456781 | TTGGAGGGCCGCACATCTGG | 106 | 2607 |
| 1178394 | 456764 | 456783 | TATTGGAGGGCCGCACATCT | 123 | 2608 |
| 1178396 | 456766 | 456785 | CCTATTGGAGGGCCGCACAT | 136 | 2609 |
| 1178398 | 456769 | 456788 | TGTCCTATTGGAGGGCCGCA | 100 | 2610 |
| 1178400 | 456771 | 456790 | TTTGTCCTATTGGAGGGCCG | 104 | 2611 |
| 1178404 | 220455 | 220474 | TACTATGTTGTCACTGAGGG | 83 | 2612 |
| | 456824 | 456843 | | | |
| 1178406 | 220457 | 220476 | GGTACTATGTTGTCACTGAG | 68 | 2613 |
| | 456826 | 456845 | | | |
| 1178408 | 456864 | 456883 | TGCCCTCTTCGAAGAGATAG | 87 | 2614 |
| 1178411 | 456914 | 456933 | GGTCACTAGGCACACTAAAG | 87 | 2615 |
| 1178413 | 456916 | 456935 | TGGGTCACTAGGCACACTAA | 87 | 2616 |
| 1178415 | 456923 | 456942 | CAAGTCTTGGGTCACTAGGC | 93 | 2617 |
| 1178417 | 456926 | 456945 | AAGCAAGTCTTGGGTCACTA | 72 | 2618 |
| 1178418 | 457232 | 457251 | CTTAGCTACTCACCCCTGTT | 111 | 2619 |
| 1178420 | 457237 | 457256 | AATGGCTTAGCTACTCACCC | 79 | 104 |
| 1178422 | 457240 | 457259 | GATAATGGCTTAGCTACTCA | 77 | 2620 |
| 1178423 | 457286 | 457305 | CGACCTAAAGACCTAGCAAA | 55 | 2621 |
| 1178425 | 457289 | 457308 | AAACGACCTAAAGACCTAGC | 50 | 2622 |
| 1178426 | 457294 | 457313 | GTACAAAACGACCTAAAGAC | 77 | 2623 |
| 1178428 | 457574 | 457593 | ATTATGAACCATGGAGTCTC | 47 | 2624 |
| 1179735 | 448291 | 448310 | TCGCAATAAGATTCCATTGC | 106 | 2625 |
| 1179742 | 448305 | 448324 | GTGCAAAACAAGTTTCGCAA | 119 | 2626 |
| 1179745 | 448453 | 448472 | CCAGTAGGACTTACTAAATC | 79 | 2627 |
| 1179747 | 448455 | 448474 | TGCCAGTAGGACTTACTAAA | 99 | 2628 |
| 1179749 | 448457 | 448476 | AGTGCCAGTAGGACTTACTA | 76 | 2629 |
| 1179751 | 448630 | 448649 | GAGGATTGCATCACATGTGT | 118 | 2630 |
| 1179753 | 448715 | 448734 | TAGCGCATTGAGCAAAATTC | 75 | 2631 |
| 1179755 | 448717 | 448736 | TGTAGCGCATTGAGCAAAAT | 75 | 2632 |
| 1179757 | 448719 | 448738 | ACTGTAGCGCATTGAGCAAA | 83 | 2633 |
| 1179759 | 448722 | 448741 | ATAACTGTAGCGCATTGAGC | 103 | 2634 |
| 1179761 | 448724 | 448743 | CGATAACTGTAGCGCATTGA | 68 | 2635 |
| 1179763 | 448727 | 448746 | CCACGATAACTGTAGCGCAT | 91 | 2636 |
| 1179765 | 448730 | 448749 | AGACCACGATAACTGTAGCG | 84 | 2637 |
| 1179767 | 448732 | 448751 | TTAGACCACGATAACTGTAG | 104 | 2638 |
| 1179769 | 448734 | 448753 | ATTTAGACCACGATAACTGT | 114 | 2639 |
| 1179770 | 448737 | 448756 | TATATTTAGACCACGATAAC | 106 | 2640 |
| 1179772 | 448740 | 448759 | CTGTATATTTAGACCACGAT | 78 | 2641 |
| 1179774 | 448828 | 448847 | AGGACCCTTAAGTCATAAAG | 75 | 2642 |
| 1179776 | 448834 | 448853 | ATTGCAAGGACCCTTAAGTC | 75 | 2643 |
| 1179778 | 448841 | 448860 | TATCCCAATTGCAAGGACCC | 131 | 2644 |
| 1179781 | 448948 | 448967 | ACGAAGCCAAAGGTACTTGA | 124 | 2645 |
| 1179783 | 449034 | 449053 | GCCCTGACTGTCATTCATAT | 86 | 2646 |
| 1179785 | 449037 | 449056 | ACGGCCCTGACTGTCATTCA | 98 | 2647 |
| 1179787 | 449039 | 449058 | GAACGGCCCTGACTGTCATT | 117 | 2648 |
| 1179789 | 449042 | 449061 | AAGGAACGGCCCTGACTGTC | 78 | 2649 |
| 1179791 | 449044 | 449063 | TGAAGGAACGGCCCTGACTG | 101 | 2650 |
| 1179793 | 449046 | 449065 | CCTGAAGGAACGGCCCTGAC | 108 | 2651 |
| 1179795 | 449049 | 449068 | TGGCCTGAAGGAACGGCCCT | 119 | 2652 |
| 1179797 | 449052 | 449071 | ATGTGGCCTGAAGGAACGGC | 76 | 2653 |
| 1179799 | 449058 | 449077 | ATAATCATGTGGCCTGAAGG | 104 | 2654 |
| 1179801 | 449060 | 449079 | CGATAATCATGTGGCCTGAA | 79 | 2655 |
| 1179803 | 449063 | 449082 | TAACGATAATCATGTGGCCT | 61 | 2656 |
| 1179805 | 449065 | 449084 | CATAACGATAATCATGTGGC | 81 | 2657 |
| 1179807 | 449101 | 449120 | GGCAAGTATGCTAGTCACTC | 73 | 2658 |
| 1179809 | 449103 | 449122 | CTGGCAAGTATGCTAGTCAC | 105 | 2659 |
| 1179811 | 449106 | 449125 | ATCCTGGCAAGTATGCTAGT | 83 | 2660 |
| 1179813 | 449108 | 449127 | AGATCCTGGCAAGTATGCTA | 103 | 2661 |
| 1179815 | 449110 | 449129 | GTAGATCCTGGCAAGTATGC | 68 | 2662 |
| 1179817 | 449115 | 449134 | CTCTTGTAGATCCTGGCAAG | 78 | 2663 |
| 1179818 | 449157 | 449176 | CAACATTATATCGATGCAAT | 89 | 2664 |
| 1179820 | 449160 | 449179 | TGTCAACATTATATCGATGC | 109 | 2665 |
| 1179822 | 449163 | 449182 | ACTTGTCAACATTATATCGA | 78 | 2666 |
| 1179825 | 448297 | 448316 | CAAGTTTCGCAATAAGATTC | 72 | 2667 |
| 1179833 | 456498 | 456517 | TTAGATTAAAATCTGGCCGG | 92 | 2668 |
| 1179834 | 456912 | 456931 | TCACTAGGCACACTAAAGTG | 107 | 2669 |
| 1179838 | 457298 | 457317 | AGATGTACAAAACGACCTAA | 99 | 2670 |
| 1179840 | 457386 | 457405 | TAAGGATTCAATAGTGTAGG | 34 | 2671 |
| 1179842 | 457503 | 457522 | GGCACACCTGGATTTCACTA | 12 | 2672 |
| 1179845 | 448416 | 448435 | GAGCAAGGGTCTTAGTGCCA | 108 | 2673 |
| 1179847 | 448625 | 448644 | TTGCATCACATGTGTCAGTC | 102 | 2674 |
| 1179849 | 448843 | 448862 | TTTATCCCAATTGCAAGGAC | 86 | 2675 |

### Example 2: Effect of 5-10-5 MOE Gapmer Modified Oligonucleotides on Human UBE3A-ATS RNA In Vitro, Single Dose

[0454] Modified oligonucleotides complementary to human UBE3A-ATS nucleic acid were tested for their effect on UBE3A-ATS RNA levels in vitro.

[0455] The modified oligonucleotides in the tables below are 5-10-5 gapmers. The gapmers are 20 nucleosides in length, wherein the central gap segment consists of ten 2′-β-D-deoxynucleosides and the 5′ and 3′ wing segments each consists of five 2′-MOE nucleosides. The sugar motif for the gampers is (from 5′ to 3′): eeeeeddddddddddeeeee; wherein ‘d’ represents a 2′-β-D-deoxyribosyl sugar moiety, and ‘e’ represents a 2′-MOE sugar moiety.

[0456] Each internucleoside linkage of Compound IDs 617456, 617457, 617460, 617461, and 617557 is a phosphorothioate internucleoside linkage. All other compounds have an internucleoside linkage motif of: soooossssssssssooss, wherein each “s” represents a phosphorothioate internucleoside linkage and each “o” represents a phosphodiester internucleoside linkage.

[0457] All cytosine residues are 5-methylcytosines.

[0458] “Start site” indicates the 5′-most nucleoside to which the modified oligonucleotide is complementary in target nucleic acid sequence. “Stop site” indicates the 3′-most nucleoside to which the modified oligonucleotide is complementary in the target nucleic acid sequence. Each modified oligonucleotide listed in the Tables below is 100% complementary to SEQ ID NO: 1. Start and stop sites for Compound 750519 are marked with a hashtag (#) in several tables below. The complete list of start sites for Compound 750519 are listed in Table 4b.

[0459] Human IPS cell derived ReproNeuro™ Neurons (ReproCELL) were cultured per manufacturer instructions at 40,000 cells per well and were treated with 8,000 nM of modified oligonucleotide by free uptake. After a treatment period of approximately 5 days, total RNA was isolated from the cells and UBE3A-ATS RNA levels were measured by quantitative real-time RTPCR. Human UBE3A-ATS primer probe set RTS4796 (described herein in Example 1) was used to measure RNA levels. UBE3A-ATS RNA levels were normalized to total RNA content, as measured by RIBOGREEN®. Reduction of UBE3A-ATS is presented in the tables below as percent UBE3A-ATS RNA amount relative to untreated control (UTC) cells. Each table represents results from an individual assay plate. The values marked with an asterisk (*) indicate that the modified oligonucleotide is complementary to the amplicon region of the primer probe set. Additional assays may be used to measure the potency and efficacy of the modified oligonucleotides complementary to the amplicon region.

TABLE 34
Reduction of UBE3A-ATS RNA by 8,000 nM 5-10-5 MOE gapmers
with mixed PO/PS internucleoside linkages in vitro

| | SEQ ID | SEQ ID | | UBE3A- | |
|---|---|---|---|---|---|
| Compound | NO: 1 | NO: 1 | | ATS | SEQ ID |
| Number | Start Site | Stop Site | Sequence (5′ to 3′) | (% UTC)) | NO |
| 617557 | 483977 | 483996 | ATCATGTGCATACCCAGGGT | 38 | 172 |
| 749882 | 460115 | 460134 | ACTTTATAGTGTGGATGGTA | 30 | 586 |
| 750519 | 349103* | 349122* | GTCATCACCTCTCTTCAGGA | 23 | 181 |
| 1165438 | 448412 | 448431 | AAGGGTCTTAGTGCCAAATA | 75 | 2075 |
| 1165443 | 449094 | 449113 | ATGCTAGTCACTCATTGAGA | 65 | 2076 |
| 1165448 | 449641 | 449660 | TGATCCATTAGATAGGCTAT | 80 | 2077 |
| 1165450 | 452254 | 452273 | TCTCACGCTGTGTGAATCAA | 81 | 2078 |
| 1165456 | 452267 | 452286 | AGGGAAGTCTAGGTCTCACG | 54 | 2079 |
| 1165472 | 454155 | 454174 | GACCCTTATGGAGACTTATA | 77 | 2080 |
| 1165478 | 454464 | 454483 | GTGGACTCCACACACCTACT | 62 | 2081 |
| 1165484 | 454579 | 454598 | GCAAGCAAAGACTACACCGT | 48 | 2082 |
| 1165488 | 454856 | 454875 | ATATTCCCTATCCAGGGTAG | 91 | 2083 |
| 1165494 | 454862 | 454881 | AGGTGTATATTCCCTATCCA | 76 | 2084 |
| 1165500 | 455029 | 455048 | TGATATTGCAGTGGGATGGC | 59 | 2085 |
| 1165504 | 456625 | 456644 | GCATGGTTATCTAATGCATC | 60 | 2086 |
| 1165511 | 220440 | 220459 | GAGGGATCCCCAAATAGAGC | 51 | 2087 |
| | 456809 | 456828 | | | |
| 1165517 | 457019 | 457038 | ATCACAGTTGCTTGACCCTT | 63 | 2088 |
| 1165523 | 457983 | 458002 | TGATCTATTATGAGGGCATC | 25 | 2089 |
| 1165529 | 458792 | 458811 | TTCCCTAATATAGGGCAGAT | 49 | 2090 |
| 1165535 | 458943 | 458962 | CTATAGGACCTCAGGAGATT | 42 | 2091 |
| 1165540 | 458951 | 458970 | CTCAAGACCTATAGGACCTC | 50 | 2092 |
| 1165547 | 460109 | 460128 | TAGTGTGGATGGTATCCTGG | 55 | 2093 |
| 1165552 | 460506 | 460525 | TAGGGTGGTTGGTTCAAAAT | 24 | 2094 |
| 1165558 | 460842 | 460861 | CACACATATAGGCTAGCCAA | 44 | 2095 |
| 1165562 | 461414 | 461433 | TGGGTTACTTTCCAATAGAG | 27 | 2096 |
| 1165573 | 464387 | 464406 | CTTAGGTAGTTCACAACTCT | 37 | 2097 |
| 1165578 | 464556 | 464575 | CCTGTAGTATGTGGATACTG | 40 | 2098 |
| 1165588 | 465372 | 465391 | GGATGGTGTGTATGTTATGA | 32 | 2099 |
| 1165599 | 467293 | 467312 | GTAGTCTATTGGTGTTCCTT | 45 | 2100 |
| 1165604 | 467418 | 467437 | ATACGCTCCTTCATTTCATG | 49 | 2101 |
| 1165613 | 483363 | 483382 | GAATTCAATGGACCCACATG | 67 | 2102 |
| 1165619 | 483961 | 483980 | GGGTAGGATTCATGGTCCAA | 43 | 2103 |
| 1165626 | 486352 | 486371 | TAATAGACTGCGATTATACA | 64 | 2104 |
| 1165642 | 493857 | 493876 | GGCCTAATCTATGCTGGGCC | 63 | 2105 |
| 1165648 | 493865 | 493884 | TGAGATTAGGCCTAATCTAT | 79 | 2106 |
| 1165654 | 496831 | 496850 | GATTAGGTATGGAGGCCATG | 48 | 2107 |
| 1165659 | 499667 | 499686 | CCCCAATACAGATTCAGTGG | 75 | 2108 |
| 1165665 | 499676 | 499695 | TCAAGGTAGCCCCAATACAG | 44 | 2109 |
| 1165669 | 500693 | 500712 | CAAGAGGTACTGTAAGCCCT | 87 | 2110 |
| 1165674 | 500907 | 500926 | TGTTTTGACCTAACTGGCCT | 75 | 2111 |
| 1165679 | 501761 | 501780 | GCTAAGAGTCACCTGTATCC | 53 | 2112 |
| 1165685 | 502372 | 502391 | AAGGTATTAAGGCCCTTGGC | 54 | 2113 |
| 1165702 | 503347 | 503366 | GGTGATCAGCTCAACACCCC | 73 | 2114 |
| 1165708 | 503362 | 503381 | AGGAGTGTTAGCCCAGGTGA | 53 | 2115 |
| 1165714 | 503369 | 503388 | GGGTCATAGGAGTGTTAGCC | 77 | 2116 |
| 1165720 | 503423 | 503442 | AAGGTGATGACACCCCTACC | 67 | 2117 |
| 1165730 | 504128 | 504147 | AGCTATTTCATTAAGTCACC | 43 | 2118 |
| 1165737 | 504432 | 504451 | GTATATTAGTCTAAGGCAGT | 30 | 2119 |
| 1165742 | 504976 | 504995 | TATTATCTTCTTAGGGTCGA | 37 | 2120 |
| 1165748 | 505174 | 505193 | TGTGTACCGAGCTCAAGAAC | 55 | 2121 |
| 1165754 | 505184 | 505203 | AGTCTGTCTCTGTGTACCGA | 70 | 2122 |
| 1165759 | 505217 | 505236 | GACACTCTCGCTGAGGACAC | 58 | 2123 |
| 1165767 | 505321 | 505340 | GCCGCCTCTGTTATTGTGAT | 56 | 2124 |
| 1165773 | 505328 | 505347 | AAATTGGGCCGCCTCTGTTA | 41 | 2125 |
| 1165784 | 505746 | 505765 | CTGTAGGTTGACAGGACATG | 50 | 2126 |
| 1165790 | 505822 | 505841 | TGAGGGTGCTTAGTGAACTG | 78 | 2127 |
| 1165801 | 506449 | 506468 | GAGTCTGTCTTTAGGGTCAC | 42 | 2128 |
| 1165803 | 507899 | 507918 | CGATACCTGCTTTTGTGACA | 54 | 2129 |
| 1165807 | 507908 | 507927 | ATAGCCATTCGATACCTGCT | 56 | 2130 |
| 1165813 | 507916 | 507935 | ACTGCAGGATAGCCATTCGA | 72 | 2131 |
| 1165824 | 508792 | 508811 | TATGAATGCCACCGTGATTG | 79 | 2132 |
| 1165846 | 453364 | 453383 | AACTACATAGGCACTCTACT | 78 | 2133 |
| 1165859 | 461526 | 461545 | AACATTCAGCTAGACTAGTT | 43 | 2134 |
| 1165860 | 461902 | 461921 | ATGAGACCCCACAATTTGGT | 79 | 2135 |
| 1165866 | 464995 | 465014 | ATAGAGGCCCTCTTGTTTCA | 60 | 2136 |
| 1165868 | 465391 | 465410 | CAATTGTCAGACTTATTGAG | 66 | 2137 |
| 1165872 | 465893 | 465912 | GAACTCCCACAAGGTACTCT | 45 | 2138 |
| 1165875 | 468353 | 468372 | CTGTAGTATGCATTGACAAG | 53 | 2139 |
| 1165881 | 484299 | 484318 | TACTAGGGCCAGAGAATCCA | 55 | 2140 |
| 1165885 | 488335 | 488354 | AAGCCACTCATGTACATGAG | 55 | 2141 |
| 1165887 | 489494 | 489513 | AAACTGGGTTGAGACTATTC | 42 | 2142 |
| 1165888 | 489580 | 489599 | CTGCAGTGGTACCACAGACC | 40 | 2143 |
| 1165896 | 502392 | 502411 | TGACTACACATCTTGTATAC | 73 | 2144 |
| 1165897 | 502450 | 502469 | CTAGGCAGCTCTTTGTAGGC | 25 | 2145 |
| 1165898 | 503807 | 503826 | CCCTATAGGTCAAAAATGCC | 51 | 2146 |
| 1165903 | 505544 | 505563 | TCAGTCAGGTACAGGTGTTG | 58 | 2147 |
| 1165904 | 505834 | 505853 | GTCAAAGACCTGTGAGGGTG | 63 | 2148 |
| 1165913 | 510480 | 510499 | GGTCTTTGCAGTTAAGTTAT | 65 | 2149 |

TABLE 35
Reduction of UBE3A-ATS RNA by 8,000 nM 5-10-5 MOE gapmers
with mixed PO/PS internucleoside linkages in vitro

| | SEQ ID | SEQ ID | | UBE3A- | |
|---|---|---|---|---|---|
| Compound | NO: 1 | NO: 1 | | ATS | SEQ ID |
| Number | Start Site | Stop Site | Sequence (5′ to 3′) | (% UTC)) | NO |
| 617557 | 483977 | 483996 | ATCATGTGCATACCCAGGGT | 52 | 172 |
| 749882 | 460115 | 460134 | ACTTTATAGTGTGGATGGTA | 38 | 586 |
| 750519 | 349103* | 349122* | GTCATCACCTCTCTTCAGGA | 26 | 181 |
| 1165437 | 448410 | 448429 | GGGTCTTAGTGCCAAATATC | 112 | 2150 |
| 1165454 | 452264 | 452283 | GAAGTCTAGGTCTCACGCTG | 84 | 2151 |
| 1165466 | 453361 | 453380 | TACATAGGCACTCTACTAGC | 96 | 2152 |
| 1165470 | 454153 | 454172 | CCCTTATGGAGACTTATATA | 81 | 2153 |
| 1165476 | 454164 | 454183 | TGAAGATTTGACCCTTATGG | 114 | 2154 |
| 1165482 | 454577 | 454596 | AAGCAAAGACTACACCGTGA | 80 | 2155 |
| 1165486 | 454847 | 454866 | ATCCAGGGTAGAAGACTAGC | 75 | 2156 |
| 1165492 | 454860 | 454879 | GTGTATATTCCCTATCCAGG | 83 | 2157 |
| 1165498 | 455016 | 455035 | GGATGGCTGTCAATGCTGAT | 84 | 2158 |
| 1165502 | 455214 | 455233 | ACAAGTCTACTACCAATAAG | 57 | 2159 |
| 1165508 | 220325 | 220344 | ATTCTCATCATCGATCCAAA | 58 | 2160 |
| | 456694 | 456713 | | | |
| 1165515 | 457017 | 457036 | CACAGTTGCTTGACCCTTAA | 58 | 2161 |
| 1165521 | 457382 | 457401 | GATTCAATAGTGTAGGTGAC | 29 | 2162 |
| 1165527 | 458789 | 458808 | CCTAATATAGGGCAGATGAT | 53 | 2163 |
| 1165533 | 458939 | 458958 | AGGACCTCAGGAGATTGTAC | 29 | 2164 |
| 1165538 | 458949 | 458968 | CAAGACCTATAGGACCTCAG | 29 | 2165 |
| 1165545 | 459548 | 459567 | AGACTATCCTGGTATGACTG | 22 | 2166 |
| 1165551 | 460353 | 460372 | TGATTGACTACTTCAACCTG | 64 | 2167 |
| 1165556 | 460512 | 460531 | CGTTTATAGGGTGGTTGGTT | 38 | 2168 |
| 1165564 | 461520 | 461539 | CAGCTAGACTAGTTGAAATC | 51 | 2169 |
| 1165569 | 461900 | 461919 | GAGACCCCACAATTTGGTCC | 94 | 2170 |
| 1165571 | 463886 | 463905 | AGGCAGTTGTGATAGTCAAC | 93 | 2171 |
| 1165577 | 464397 | 464416 | CCATTCAGCACTTAGGTAGT | 29 | 2172 |
| 1165581 | 464561 | 464580 | TATGCCCTGTAGTATGTGGA | 56 | 2173 |
| 1165586 | 465244 | 465263 | TTTTATTGGTCATCTCGGGT | 27 | 2174 |
| 1165591 | 465385 | 465404 | TCAGACTTATTGAGGATGGT | 47 | 2175 |
| 1165597 | 466248 | 466267 | ACTGGTAGGATCTATGGCAG | 43 | 2176 |
| 1165602 | 467299 | 467318 | CACAGAGTAGTCTATTGGTG | 62 | 2177 |
| 1165608 | 467805 | 467824 | GTCTCCCTCTTAGTGATTGG | 25 | 2178 |
| 1165611 | 474168 | 474187 | AGTGGTTGCCTTAGTATTAC | 20 | 2179 |
| 1165617 | 483858 | 483877 | TGTAAATGGCCTGACTAGGC | 75 | 2180 |
| 1165624 | 485655 | 485674 | CTAGGACCAGTTGGTTCACT | 72 | 2181 |
| 1165637 | 489520 | 489539 | AATGGACCACCTAAGACCTC | 85 | 2182 |
| 1165640 | 493853 | 493872 | TAATCTATGCTGGGCCCCAA | 76 | 2183 |
| 1165646 | 493863 | 493882 | AGATTAGGCCTAATCTATGC | 94 | 2184 |
| 1165652 | 496808 | 496827 | GACCCTCATCACTTTTTGAC | 66 | 2185 |
| 1165658 | 498508 | 498527 | GCCCGGCAAGAGATTCACTT | 79 | 2186 |
| 1165663 | 499673 | 499692 | AGGTAGCCCCAATACAGATT | 60 | 2187 |
| 1165667 | 500493 | 500512 | AGGGCCATGTTAAAGGCCTC | 82 | 2188 |
| 1165672 | 500901 | 500920 | GACCTAACTGGCCTTTGGGT | 64 | 2189 |
| 1165683 | 502143 | 502162 | TATGTGGAATCAGTGCTACC | 75 | 2190 |
| 1165689 | 502377 | 502396 | TATACAAGGTATTAAGGCCC | 55 | 2191 |
| 1165694 | 502446 | 502465 | GCAGCTCTTTGTAGGCCCAA | 25 | 2192 |
| 1165700 | 503099 | 503118 | GACTAATAGGCCTTTCTACA | 59 | 2193 |
| 1165706 | 503360 | 503379 | GAGTGTTAGCCCAGGTGATC | 57 | 2194 |
| 1165712 | 503366 | 503385 | TCATAGGAGTGTTAGCCCAG | 36 | 2195 |
| 1165718 | 503420 | 503439 | GTGATGACACCCCTACCATG | 96 | 2196 |
| 1165724 | 503427 | 503446 | GATTAAGGTGATGACACCCC | 27 | 2197 |
| 1165728 | 503943 | 503962 | CACCAACCTTAAATAGTAGG | 63 | 2198 |
| 1165735 | 504429 | 504448 | TATTAGTCTAAGGCAGTCAG | 78 | 2199 |
| 1165741 | 504653 | 504672 | GGAGCCTTACGCTTGGCTGA | 55 | 2200 |
| 1165746 | 505172 | 505191 | TGTACCGAGCTCAAGAACTG | 58 | 2201 |
| 1165752 | 505180 | 505199 | TGTCTCTGTGTACCGAGCTC | 59 | 2202 |
| 1165758 | 505215 | 505234 | CACTCTCGCTGAGGACACAT | 60 | 2203 |
| 1165765 | 505319 | 505338 | CGCCTCTGTTATTGTGATAT | 83 | 2204 |
| 1165771 | 505326 | 505345 | ATTGGGCCGCCTCTGTTATT | 54 | 2205 |
| 1165777 | 505333 | 505352 | TGTAGAAATTGGGCCGCCTC | 41 | 2206 |
| 1165782 | 505744 | 505763 | GTAGGTTGACAGGACATGCT | 75 | 2207 |
| 1165788 | 505819 | 505838 | GGGTGCTTAGTGAACTGTGG | 30 | 2208 |
| 1165794 | 505829 | 505848 | AGACCTGTGAGGGTGCTTAG | 84 | 2209 |
| 1165799 | 506279 | 506298 | GTCTACCAGGGTGGTATTAT | 70 | 2210 |
| 1165802 | 506782 | 506801 | TATATACTCCAGGTTGTGGA | 44 | 2211 |
| 1165805 | 507906 | 507925 | AGCCATTCGATACCTGCTTT | 50 | 2212 |
| 1165811 | 507913 | 507932 | GCAGGATAGCCATTCGATAC | 78 | 2213 |
| 1165822 | 508789 | 508808 | GAATGCCACCGTGATTGCAA | 51 | 2214 |
| 1165827 | 510129 | 510148 | GCACATAGACCATAGCTGAA | 32 | 2215 |
| 1165840 | 448466 | 448485 | CAATAGAATAGTGCCAGTAG | 74 | 2216 |
| 1165841 | 449441 | 449460 | TGATCATACTGGAGCCAGGT | 60 | 2217 |
| 1165845 | 452251 | 452270 | CACGCTGTGTGAATCAAAAG | 87 | 2218 |
| 1165855 | 460974 | 460993 | GTGTTTATCCAAACCAAGGG | 21 | 2219 |
| 1165871 | 465890 | 465909 | CTCCCACAAGGTACTCTTGC | 72 | 2220 |
| 1165879 | 484093 | 484112 | GGATGTCAGTTCAGATGAAC | 74 | 2221 |
| 1165883 | 486393 | 486412 | CAACATAGATCCTCTGTTAG | 74 | 2222 |
| 1165886 | 489101 | 489120 | CTGCTCCCTAAGCTTAGATA | 58 | 2223 |
| 1165895 | 501152 | 501171 | AGTAAAGAGCCACCTAAGGG | 100 | 2224 |

TABLE 36
Reduction of UBE3A-ATS RNA by 8,000 nM 5-10-5 MOE gapmers with
mixed PO/PS internucleoside linkages in vitro

| | SEQ ID | SEQ ID | | UBE3A- | |
|---|---|---|---|---|---|
| Compound | NO: 1 | NO: 1 | | ATS | SEQ ID |
| Number | Start Site | Stop Site | Sequence (5′ to 3′) | (% UTC) | NO |
| 617557 | 483977 | 483996 | ATCATGTGCATACCCAGGGT | 40 | 172 |
| 749882 | 460115 | 460134 | ACTTTATAGTGTGGATGGTA | 75 | 586 |
| 750519 | 349103* | 349122* | GTCATCACCTCTCTTCAGGA | 28 | 181 |
| 1165436 | 448409 | 448428 | GGTCTTAGTGCCAAATATCC | 46 | 2225 |
| 1165441 | 448460 | 448479 | AATAGTGCCAGTAGGACTTA | 71 | 2226 |
| 1165446 | 449099 | 449118 | CAAGTATGCTAGTCACTCAT | 40 | 2227 |
| 1165453 | 452260 | 452279 | TCTAGGTCTCACGCTGTGTG | 53 | 2228 |
| 1165460 | 453213 | 453232 | ATAGTGTTCTTACATCCACC | 59 | 2229 |
| 1165469 | 454152 | 454171 | CCTTATGGAGACTTATATAC | 103 | 2230 |
| 1165475 | 454163 | 454182 | GAAGATTTGACCCTTATGGA | 91 | 2231 |
| 1165481 | 454576 | 454595 | AGCAAAGACTACACCGTGAC | 69 | 2232 |
| 1165491 | 454859 | 454878 | TGTATATTCCCTATCCAGGG | 106 | 2233 |
| 1165497 | 455015 | 455034 | GATGGCTGTCAATGCTGATA | 53 | 2234 |
| 1165507 | 220321 | 220340 | TCATCATCGATCCAAACAAG | 58 | 2235 |
| | 456690 | 456709 | | | |
| 1165514 | 457016 | 457035 | ACAGTTGCTTGACCCTTAAT | 126 | 2236 |
| 1165520 | 457379 | 457398 | TCAATAGTGTAGGTGACATG | 63 | 2237 |
| 1165526 | 458398 | 458417 | ATGTGGGCCTCTATTAAGAT | 47 | 2238 |
| 1165532 | 458937 | 458956 | GACCTCAGGAGATTGTACAA | 45 | 2239 |
| 1165537 | 458948 | 458967 | AAGACCTATAGGACCTCAGG | 53 | 2240 |
| 1165544 | 459547 | 459566 | GACTATCCTGGTATGACTGT | 57 | 2241 |
| 1165550 | 460352 | 460371 | GATTGACTACTTCAACCTGA | 23 | 2242 |
| 1165555 | 460510 | 460529 | TTTATAGGGTGGTTGGTTCA | 30 | 2243 |
| 1165561 | 460850 | 460869 | GGATTTACCACACATATAGG | 39 | 2244 |
| 1165563 | 461451 | 461470 | GGTAAGGCAGCTCCTGACAA | 32 | 2245 |
| 1165568 | 461899 | 461918 | AGACCCCACAATTTGGTCCC | 51 | 2246 |
| 1165576 | 464390 | 464409 | GCACTTAGGTAGTTCACAAC | 41 | 2247 |
| 1165585 | 465243 | 465262 | TTTATTGGTCATCTCGGGTA | 44 | 2248 |
| 1165590 | 465384 | 465403 | CAGACTTATTGAGGATGGTG | 30 | 2249 |
| 1165593 | 465564 | 465583 | TTAGGACAAGTCTTATAGAG | 20 | 2250 |
| 1165596 | 466247 | 466266 | CTGGTAGGATCTATGGCAGT | 32 | 2251 |
| 1165601 | 467298 | 467317 | ACAGAGTAGTCTATTGGTGT | 67 | 2252 |
| 1165607 | 467804 | 467823 | TCTCCCTCTTAGTGATTGGT | 45 | 2253 |
| 1165616 | 483851 | 483870 | GGCCTGACTAGGCATTGAAT | 16 | 2254 |
| 1165621 | 483976 | 483995 | TCATGTGCATACCCAGGGTA | 76 | 2255 |
| 1165623 | 485654 | 485673 | TAGGACCAGTTGGTTCACTG | 66 | 2256 |
| 1165629 | 486356 | 486375 | ATGTTAATAGACTGCGATTA | 102 | 2257 |
| 1165632 | 489099 | 489118 | GCTCCCTAAGCTTAGATATA | 85 | 2258 |
| 1165636 | 489519 | 489538 | ATGGACCACCTAAGACCTCA | 79 | 2259 |
| 1165639 | 493852 | 493871 | AATCTATGCTGGGCCCCAAT | 52 | 2260 |
| 1165645 | 493862 | 493881 | GATTAGGCCTAATCTATGCT | 71 | 2261 |
| 1165651 | 496565 | 496584 | TCCATCTACTATTAATGAGC | 81 | 2262 |
| 1165657 | 497266 | 497285 | GATTAGGCAGCTTCACTACT | 52 | 2263 |
| 1165662 | 499671 | 499690 | GTAGCCCCAATACAGATTCA | 35 | 2264 |
| 1165671 | 500900 | 500919 | ACCTAACTGGCCTTTGGGTC | 111 | 2265 |
| 1165677 | 500913 | 500932 | TCAAGGTGTTTTGACCTAAC | 64 | 2266 |
| 1165682 | 501766 | 501785 | GATGGGCTAAGAGTCACCTG | 99 | 2267 |
| 1165688 | 502375 | 502394 | TACAAGGTATTAAGGCCCTT | 98 | 2268 |
| 1165693 | 502442 | 502461 | CTCTTTGTAGGCCCAAGGGA | 66 | 2269 |
| 1165698 | 502763 | 502782 | AATAGGCACTTCGGGCAAAT | 75 | 2270 |
| 1165705 | 503359 | 503378 | AGTGTTAGCCCAGGTGATCA | 71 | 2271 |
| 1165711 | 503365 | 503384 | CATAGGAGTGTTAGCCCAGG | 61 | 2272 |
| 1165717 | 503419 | 503438 | TGATGACACCCCTACCATGG | 96 | 2273 |
| 1165723 | 503426 | 503445 | ATTAAGGTGATGACACCCCT | 81 | 2274 |
| 1165734 | 504428 | 504447 | ATTAGTCTAAGGCAGTCAGG | 96 | 2275 |
| 1165740 | 504436 | 504455 | GTAGGTATATTAGTCTAAGG | 51 | 2276 |
| 1165745 | 505171 | 505190 | GTACCGAGCTCAAGAACTGT | 71 | 2277 |
| 1165751 | 505178 | 505197 | TCTCTGTGTACCGAGCTCAA | 58 | 2278 |
| 1165757 | 505214 | 505233 | ACTCTCGCTGAGGACACATC | 73 | 2279 |
| 1165762 | 505223 | 505242 | AATGAGGACACTCTCGCTGA | 76 | 2280 |
| 1165770 | 505325 | 505344 | TTGGGCCGCCTCTGTTATTG | 51 | 2281 |
| 1165776 | 505332 | 505351 | GTAGAAATTGGGCCGCCTCT | 35 | 2282 |
| 1165781 | 505743 | 505762 | TAGGTTGACAGGACATGCTG | 66 | 2283 |
| 1165787 | 505815 | 505834 | GCTTAGTGAACTGTGGGCAC | 72 | 2284 |
| 1165793 | 505827 | 505846 | ACCTGTGAGGGTGCTTAGTG | 62 | 2285 |
| 1165798 | 506277 | 506296 | CTACCAGGGTGGTATTATAA | 33 | 2286 |
| 1165810 | 507912 | 507931 | CAGGATAGCCATTCGATACC | 44 | 2287 |
| 1165821 | 508786 | 508805 | TGCCACCGTGATTGCAAAGT | 61 | 2288 |
| 1165826 | 510127 | 510146 | ACATAGACCATAGCTGAACC | 65 | 2289 |
| 1165844 | 449863 | 449882 | GGCATCCTTAAATCCTGGTT | 66 | 2290 |
| 1165849 | 454845 | 454864 | CCAGGGTAGAAGACTAGCAT | 74 | 2291 |
| 1165851 | 455058 | 455077 | GAACCCTTTGGTCTAAGCAA | 80 | 2292 |
| 1165863 | 463777 | 463796 | TATAGATTGGGCTTTAGAGG | 76 | 2293 |
| 1165865 | 464560 | 464579 | ATGCCCTGTAGTATGTGGAT | 74 | 2294 |
| 1165877 | 473792 | 473811 | GTAATGCTGTTGTACACTAG | 59 | 2295 |
| 1165893 | 499914 | 499933 | TTTTGCATAATAGGAGGTCC | 62 | 2296 |
| 1165899 | 503942 | 503961 | ACCAACCTTAAATAGTAGGA | 61 | 2297 |
| 1165907 | 506780 | 506799 | TATACTCCAGGTTGTGGAGG | 55 | 2298 |
| 1165910 | 507903 | 507922 | CATTCGATACCTGCTTTTGT | 71 | 2299 |

TABLE 37
Reduction of UBE3A-ATS RNA by 8,000 nM 5-10-5 MOE gapmers
with mixed PO/PS internucleoside linkages in vitro

| | SEQ ID | SEQ ID | | | |
|---|---|---|---|---|---|
| | NO: 1 | NO: 1 | | UBE3A- | SEQ |
| Compound | Start | Stop | | ATS | ID |
| Number | Site | Site | Sequence (5′ to 3′) | (% UTC) | NO |
| 1065438 | 449442 | 449461 | ATGATCATACTGGAGCCAGG | 65 | 1936 |
| 1178376 | 220314 | 220333 | CGATCCAAACAAGCACCCTC | 80 | 2300 |
| | 456683 | 456702 | | | |
| 1178378 | 220316 | 220335 | ATCGATCCAAACAAGCACCC | 69 | 2301 |
| | 456685 | 456704 | | | |
| 1178380 | 220319 | 220338 | ATCATCGATCCAAACAAGCA | 55 | 2302 |
| | 456688 | 456707 | | | |
| 1178385 | 456754 | 456773 | CCGCACATCTGGACCTCAGA | 97 | 2303 |
| 1178387 | 456756 | 456775 | GGCCGCACATCTGGACCTCA | 89 | 2304 |
| 1178389 | 456759 | 456778 | GAGGGCCGCACATCTGGACC | 94 | 2305 |
| 1178391 | 456761 | 456780 | TGGAGGGCCGCACATCTGGA | 83 | 2306 |
| 1178393 | 456763 | 456782 | ATTGGAGGGCCGCACATCTG | 93 | 2307 |
| 1178395 | 456765 | 456784 | CTATTGGAGGGCCGCACATC | 63 | 2308 |
| 1178397 | 456767 | 456786 | TCCTATTGGAGGGCCGCACA | 90 | 2309 |
| 1178399 | 456770 | 456789 | TTGTCCTATTGGAGGGCCGC | 64 | 2310 |
| 1178401 | 220403 | 220422 | ATTTGTCCTATTGGAGGGCC | 101 | 2311 |
| | 456772 | 456791 | | | |
| 1178403 | 220452 | 220471 | TATGTTGTCACTGAGGGATC | 78 | 2312 |
| | 456821 | 456840 | | | |
| 1178405 | 220456 | 220475 | GTACTATGTTGTCACTGAGG | 80 | 2313 |
| | 456825 | 456844 | | | |
| 1178407 | 456863 | 456882 | GCCCTCTTCGAAGAGATAGA | 90 | 2314 |
| 1178409 | 456865 | 456884 | CTGCCCTCTTCGAAGAGATA | 58 | 2315 |
| 1178410 | 456913 | 456932 | GTCACTAGGCACACTAAAGT | 62 | 2316 |
| 1178412 | 456915 | 456934 | GGGTCACTAGGCACACTAAA | 76 | 2317 |
| 1178414 | 456922 | 456941 | AAGTCTTGGGTCACTAGGCA | 63 | 2318 |
| 1178416 | 456924 | 456943 | GCAAGTCTTGGGTCACTAGG | 81 | 2319 |
| 1178419 | 457236 | 457255 | ATGGCTTAGCTACTCACCCC | 68 | 2320 |
| 1178421 | 457239 | 457258 | ATAATGGCTTAGCTACTCAC | 60 | 2321 |
| 1178424 | 457287 | 457306 | ACGACCTAAAGACCTAGCAA | 49 | 2322 |
| 1178427 | 457297 | 457316 | GATGTACAAAACGACCTAAA | 60 | 2323 |
| 1179741 | 448298 | 448317 | ACAAGTTTCGCAATAAGATT | 55 | 2324 |
| 1179743 | 448414 | 448433 | GCAAGGGTCTTAGTGCCAAA | 78 | 2325 |
| 1179744 | 448450 | 448469 | GTAGGACTTACTAAATCATC | 75 | 2326 |
| 1179746 | 448454 | 448473 | GCCAGTAGGACTTACTAAAT | 57 | 2327 |
| 1179748 | 448456 | 448475 | GTGCCAGTAGGACTTACTAA | 62 | 2328 |
| 1179750 | 448629 | 448648 | AGGATTGCATCACATGTGTC | 56 | 2329 |
| 1179752 | 448714 | 448733 | AGCGCATTGAGCAAAATTCC | 82 | 2330 |
| 1179754 | 448716 | 448735 | GTAGCGCATTGAGCAAAATT | 76 | 2331 |
| 1179756 | 448718 | 448737 | CTGTAGCGCATTGAGCAAAA | 83 | 2332 |
| 1179758 | 448720 | 448739 | AACTGTAGCGCATTGAGCAA | 52 | 2333 |
| 1179760 | 448723 | 448742 | GATAACTGTAGCGCATTGAG | 85 | 2334 |
| 1179762 | 448726 | 448745 | CACGATAACTGTAGCGCATT | 38 | 2335 |
| 1179764 | 448728 | 448747 | ACCACGATAACTGTAGCGCA | 67 | 2336 |
| 1179766 | 448731 | 448750 | TAGACCACGATAACTGTAGC | 80 | 2337 |
| 1179768 | 448733 | 448752 | TTTAGACCACGATAACTGTA | 54 | 2338 |
| 1179771 | 448738 | 448757 | GTATATTTAGACCACGATAA | 58 | 2339 |
| 1179773 | 448741 | 448760 | TCTGTATATTTAGACCACGA | 49 | 2340 |
| 1179775 | 448831 | 448850 | GCAAGGACCCTTAAGTCATA | 72 | 2341 |
| 1179777 | 448836 | 448855 | CAATTGCAAGGACCCTTAAG | 99 | 2342 |
| 1179779 | 448842 | 448861 | TTATCCCAATTGCAAGGACC | 49 | 2343 |
| 1179780 | 448920 | 448939 | AGTCAGGCACCAGATTGCTC | 112 | 2344 |
| 1179782 | 448949 | 448968 | AACGAAGCCAAAGGTACTTG | 80 | 2345 |
| 1179784 | 449036 | 449055 | CGGCCCTGACTGTCATTCAT | 71 | 2346 |
| 1179786 | 449038 | 449057 | AACGGCCCTGACTGTCATTC | 53 | 2347 |
| 1179788 | 449040 | 449059 | GGAACGGCCCTGACTGTCAT | 95 | 2348 |
| 1179790 | 449043 | 449062 | GAAGGAACGGCCCTGACTGT | 70 | 2349 |
| 1179792 | 449045 | 449064 | CTGAAGGAACGGCCCTGACT | 105 | 2350 |
| 1179794 | 449047 | 449066 | GCCTGAAGGAACGGCCCTGA | 111 | 2351 |
| 1179796 | 449051 | 449070 | TGTGGCCTGAAGGAACGGCC | 100 | 2352 |
| 1179798 | 449054 | 449073 | TCATGTGGCCTGAAGGAACG | 68 | 2353 |
| 1179800 | 449059 | 449078 | GATAATCATGTGGCCTGAAG | 49 | 2354 |
| 1179802 | 449062 | 449081 | AACGATAATCATGTGGCCTG | 86 | 2355 |
| 1179804 | 449064 | 449083 | ATAACGATAATCATGTGGCC | 52 | 2356 |
| 1179806 | 449096 | 449115 | GTATGCTAGTCACTCATTGA | 91 | 2357 |
| 1179808 | 449102 | 449121 | TGGCAAGTATGCTAGTCACT | 12 | 2358 |
| 1179810 | 449104 | 449123 | CCTGGCAAGTATGCTAGTCA | 76 | 2359 |
| 1179812 | 449107 | 449126 | GATCCTGGCAAGTATGCTAG | 103 | 2360 |
| 1179814 | 449109 | 449128 | TAGATCCTGGCAAGTATGCT | 71 | 2361 |
| 1179816 | 449111 | 449130 | TGTAGATCCTGGCAAGTATG | 79 | 2362 |
| 1179819 | 449158 | 449177 | TCAACATTATATCGATGCAA | 66 | 2363 |
| 1179821 | 449162 | 449181 | CTTGTCAACATTATATCGAT | 61 | 2364 |
| 1179823 | 449164 | 449183 | AACTTGTCAACATTATATCG | 79 | 2365 |
| 1179824 | 448294 | 448313 | GTTTCGCAATAAGATTCCAT | 98 | 2366 |
| 1179835 | 457231 | 457250 | TTAGCTACTCACCCCTGTTC | 74 | 2367 |
| 1179836 | 457241 | 457260 | AGATAATGGCTTAGCTACTC | 63 | 2368 |
| 1179837 | 457290 | 457309 | AAAACGACCTAAAGACCTAG | 92 | 2369 |
| 1179839 | 457384 | 457403 | AGGATTCAATAGTGTAGGTG | 25 | 2370 |
| 1179841 | 457502 | 457521 | GCACACCTGGATTTCACTAC | 33 | 2371 |
| 1179843 | 457505 | 457524 | TTGGCACACCTGGATTTCAC | 28 | 2372 |
| 1179844 | 457674 | 457693 | ATAACTTACCTTGTTGCAAC | 65 | 2373 |
| 1179846 | 448600 | 448619 | TTGAGAAGAAAACCCTATCG | 82 | 2374 |
| 1179848 | 448736 | 448755 | ATATTTAGACCACGATAACT | 83 | 2375 |
| 1179850 | 449117 | 449136 | CCCTCTTGTAGATCCTGGCA | 51 | 2376 |

### Example 3: Effect of 5-10-5 MOE Gapmer Modified Oligonucleotides on Human UBE3A-ATS RNA In Vitro, Single Dose

[0460] Modified oligonucleotides complementary to human UBE3A-ATS nucleic acid were tested for their effect on UBE3A-ATS RNA levels in vitro, essentially as described in Example 1, except that human UBE3A-ATS primer probe set LTS01075 (forward sequence GCCCGAAGTGCCTATTCCTT, designated herein as SEQ ID NO: 5; reverse sequence TGGTCAGGAGAACATAGGCATAAA, designated herein as SEQ ID NO: 6; probe sequence ACTCCCAGGGTTGATGGGCTACATCC, designated herein as SEQ ID NO: 7) was used to measure RNA levels.

[0461] The modified oligonucleotides in the tables below are 5-10-5 gapmers. The gapmers are 20 nucleosides in length, wherein the central gap segment consists of ten 2′-β-D-deoxynucleosides and the 3′ and 5′ wing segments each consists of five 2′-MOE nucleosides. The sugar motif for the gapmer is (from 5′ to 3′): eeeeeddddddddddeeeee; wherein ‘d’ represents a 2′-β-D-deoxyribosyl sugar moiety, and ‘e’ represents a 2′-MOE sugar moiety. Each internucleoside linkage of Compound IDs 617456, 617457, 617460, 617461, and 617557 is a phosphorothioate internucleoside linkage. All other compounds have an internucleoside linkage motif of: soooossssssssssooss, wherein each “s” represents a phosphorothioate internucleoside linkage and each “o” represents a phosphodiester internucleoside linkage.

[0462] All cytosine residues are 5-methylcytosines.

[0463] “Start site” indicates the 5′-most nucleoside to which the modified oligonucleotide is complementary in the target nucleic acid. “Stop site” indicates the 3′-most nucleoside to which the modified oligonucleotide is complementary in the target nucleic acid. Each modified oligonucleotide listed in the Tables below is 100% complementary to SEQ ID NO: 1.

[0464] Reduction of UBE3A-ATS RNA is presented in the tables below as percent UBE3A-ATS RNA amount relative to untreated control (UTC) cells. The values marked with an asterisk (*) indicate that the modified oligonucleotide is complementary to the amplicon region of the primer probe set. Additional assays may be used to measure the potency and efficacy of the modified oligonucleotides complementary to the amplicon region.

TABLE 38
Reduction of UBE3A-ATS RNA by 7,000 nM 5-10-5 MOE gapmers with PS
internucleoside linkages in vitro (35,000 cells/well)

| | SEQ ID | SEQ ID | | UBE3A- | SEQ |
|---|---|---|---|---|---|
| Compound | NO: 1 | NO: 1 | | ATS | ID |
| Number | Start Site | Stop Site | Sequence (5′ to 3′) | (% UTC) | NO |
| 617456 | 463905 | 463924 | CAACTGTTACCAAGACTTCA | 25 | 32 |
| 617457 | 465003 | 465022 | ATCTGCGAATAGAGGCCCTC | 14 | 33 |
| 617460 | 466539 | 466558 | TAGGTTGCATAAAGCCAGGC | 22 | 36 |
| 617461 | 466981 | 467000 | CACACATCTTGTTCCCTCAA | 15 | 37 |
| 617557 | 483977 | 483996 | ATCATGTGCATACCCAGGGT | 17 | 172 |
| 699779 | 463905 | 463924 | CAACTGTTACCAAGACTTCA | 42 | 32 |
| 749897 | 461087 | 461106 | AATAATATTACTGCCAAATG | 85 | 2676 |
| 749898 | 461222 | 461241 | TGAATCAATTTTCAATATTT | 104 | 2677 |
| 749899 | 461325 | 461344 | TTATAAACTTCAGCAGAGTC | 41 | 2678 |
| 749900 | 461397 | 461416 | GAGTTGTTATTTGCATTAAG | 44 | 2679 |
| 749901 | 461431 | 461450 | ATTAGCACTTCTATAACTGG | 49 | 2680 |
| 749902 | 461442 | 461461 | GCTCCTGACAAATTAGCACT | 91 | 1329 |
| 749903 | 461455 | 461474 | TCTTGGTAAGGCAGCTCCTG | 64 | 2681 |
| 749904 | 461467 | 461486 | TACTCATCATGATCTTGGTA | 54 | 2682 |
| 749905 | 461516 | 461535 | TAGACTAGTTGAAATCGGAA | 46 | 2683 |
| 749906 | 461556 | 461575 | AATTCTAAAAGTCCTCTCTT | 69 | 2684 |
| 749907 | 461590 | 461609 | TGTGAGATAATTCAGGAGGT | 11 | 2685 |
| 749908 | 461810 | 461829 | ATTCACTTTATAAACACTGA | 68 | 2686 |
| 749909 | 461895 | 461914 | CCCACAATTTGGTCCCATTG | 39 | 2687 |
| 749910 | 462029 | 462048 | GAATAGGGCTCTGCTTATTT | 57 | 2688 |
| 749911 | 462064 | 462083 | TTTTATGGCCCTCCCATCAG | 81 | 2689 |
| 749912 | 462098 | 462117 | CATGAATTTAATTCTTTAAA | 80 | 2690 |
| 749913 | 462126 | 462145 | CATTGTGGAATTAAATTAAC | 54 | 2691 |
| 749914 | 462141 | 462160 | TTTCTAATTCAATATCATTG | 59 | 2692 |
| 749915 | 462149 | 462168 | TCCTCTTATTTCTAATTCAA | 54 | 2693 |
| 749916 | 462159 | 462178 | CAAGAGATATTCCTCTTATT | 41 | 2694 |
| 749917 | 462212 | 462231 | CAATAAATAGGTCAGAAATG | 84 | 2695 |
| 749918 | 462406 | 462425 | CTAAGTTTCTTAAGGTAAAA | 65 | 2696 |
| 749919 | 462607 | 462626 | CATTTTCAAATATTGGTATT | 77 | 2697 |
| 749920 | 462625 | 462644 | TAATGATTTGCCCTCCTACA | 51 | 2698 |
| 749921 | 462626 | 462645 | GTAATGATTTGCCCTCCTAC | 26 | 1702 |
| 749922 | 462674 | 462693 | CCTTTTAAATAATTTTTCCT | 66 | 2699 |
| 749923 | 462992 | 463011 | AAAATGTTGGCATACATTTT | 70 | 2700 |
| 749924 | 462993 | 463012 | AAAAATGTTGGCATACATTT | 69 | 2701 |
| 749925 | 463248 | 463267 | CCTGGGTATTGCTGTCCAAA | 36 | 2702 |
| 749926 | 463307 | 463326 | TATGTTCCTAAGGAATAATG | 113 | 2703 |
| 749927 | 463318 | 463337 | TTCTTTGCATTTATGTTCCT | 40 | 2704 |
| 749928 | 463319 | 463338 | TTTCTTTGCATTTATGTTCC | 36 | 2705 |
| 749929 | 463453 | 463472 | TTACTCTGACTTTCCAGAAG | 70 | 2706 |
| 749930 | 463474 | 463493 | GGAGTAGATTTTTGGAGTTT | 43 | 2707 |
| 749931 | 463512 | 463531 | TCAACTATTTCTATCAAGGC | 22 | 2708 |
| 749932 | 463519 | 463538 | ATTAATTTCAACTATTTCTA | 87 | 2709 |
| 749933 | 463601 | 463620 | TCTTACTGATTCAGCCATTT | 27 | 2710 |
| 749934 | 463663 | 463682 | TCTCAGCACTAGGGAGAAAA | 56 | 2711 |
| 749935 | 463695 | 463714 | AGTGGTTGCTATCCTGCTAA | 71 | 2000 |
| 749936 | 463788 | 463807 | AATATAAATCCTATAGATTG | 71 | 2712 |
| 749937 | 463805 | 463824 | CTGAGTCAGTCCAAATGAAT | 40 | 2713 |
| 749938 | 463840 | 463859 | TACCTTGAAATTGAGATTTC | 50 | 2714 |
| 749939 | 463853 | 463872 | TCTTTTTGACCAATACCTTG | 34 | 2715 |
| 749940 | 463871 | 463890 | TCAACAATTGCCATGGATTC | 78 | 2716 |
| 749941 | 463895 | 463914 | CAAGACTTCAGGCAGTTGTG | 54 | 2717 |
| 749942 | 463898 | 463917 | TACCAAGACTTCAGGCAGTT | 51 | 2718 |
| 749943 | 463900 | 463919 | GTTACCAAGACTTCAGGCAG | 35 | 2719 |
| 749944 | 463903 | 463922 | ACTGTTACCAAGACTTCAGG | 37 | 2720 |
| 749945 | 463907 | 463926 | CCCAACTGTTACCAAGACTT | 27 | 2721 |
| 749946 | 463910 | 463929 | TATCCCAACTGTTACCAAGA | 37 | 2722 |
| 749947 | 463912 | 463931 | TTTATCCCAACTGTTACCAA | 29 | 2723 |
| 749948 | 463915 | 463934 | TTGTTTATCCCAACTGTTAC | 42 | 2724 |
| 749949 | 463926 | 463945 | TGATCAGCTTCTTGTTTATC | 29 | 2725 |
| 749950 | 464355 | 464374 | CCAGAGCATAAAAGGAAAGC | 87 | 2726 |
| 749951 | 464377 | 464396 | TCACAACTCTTCCTTAGCTT | 28 | 2727 |
| 749952 | 464525 | 464544 | CAGTTAGGTTAGTGCACAGA | 44 | 2728 |
| 749953 | 464530 | 464549 | CTGCTCAGTTAGGTTAGTGC | 31 | 2729 |
| 749954 | 464542 | 464561 | ATACTGAAGTCTCTGCTCAG | 53 | 2730 |
| 749955 | 464738 | 464757 | TGTGCCATATTTTTCTATTT | 41 | 2731 |
| 749956 | 464993 | 465012 | AGAGGCCCTCTTGTTTCAAT | 36 | 2732 |
| 749957 | 464996 | 465015 | AATAGAGGCCCTCTTGTTTC | 42 | 2733 |
| 749958 | 464998 | 465017 | CGAATAGAGGCCCTCTTGTT | 59 | 2734 |
| 749959 | 465001 | 465020 | CTGCGAATAGAGGCCCTCTT | 35 | 2735 |
| 749960 | 465003 | 465022 | ATCTGCGAATAGAGGCCCTC | 30 | 33 |
| 749961 | 465005 | 465024 | AAATCTGCGAATAGAGGCCC | 33 | 2736 |
| 749962 | 465008 | 465027 | CTCAAATCTGCGAATAGAGG | 34 | 2737 |
| 749963 | 465010 | 465029 | TGCTCAAATCTGCGAATAGA | 67 | 2738 |
| 749964 | 465013 | 465032 | GCCTGCTCAAATCTGCGAAT | 24 | 2739 |
| 749965 | 465050 | 465069 | AGTTGACATATCTTCAAGTT | 69 | 2740 |
| 749966 | 465057 | 465076 | TAATCTCAGTTGACATATCT | 55 | 2741 |
| 749967 | 465059 | 465078 | GATAATCTCAGTTGACATAT | 42 | 2742 |

### Example 4: Effect of Modified Oligonucleotides on Human UBE3A-ATS RNA In Vitro, Multiple Doses

[0465] Modified oligonucleotides selected from the examples above were tested at various doses in human IPS derived iCell GABANeurons (Cellular Dynamics). Cells were plated at a density of 35,000-60,000 cells per well, maintained per manufacturer instructions, and treated with modified oligonucleotides by free uptake at various concentrations as specified in the tables below. After a treatment period of approximately 6 days, total RNA was isolated from the cells and UBE3A-AT'S RNA levels were measured by quantitative real-time PCR. Human UBE3A-ATS primer probe set RTS4796, described hereinabove, was used to measure RNA levels. UBE3A-ATS RNA levels were normalized according to total RNA content, as measured by RIBOGREEN®. Reduction of UBE3A-ATS RNA is presented in the tables below as percent UBE3A-ATS RNA amount relative to untreated control (UTC) cells.

[0466] Where possible, the half maximal inhibitory concentration (IC₅₀) of each modified oligonucleotide was calculated using a linear regression on a log/linear plot of the data in excel. In some cases, an IC₅₀ could not be reliably calculated and the data point is marked as “N.C.”. Values marked with “N.D.” indicate that a value was not determined in this experiment.

TABLE 39
Dose-dependent percent reduction of human
UBE3A-ATS RNA in vitro (60,000 cells/well)

| Compound | UBE3A-ATS expression (% UTC) | | | |
|---|---|---|---|---|
| Number | 740.7 nM | 2,222 nM | 6,666 nM | 20,000 nM |
| 617456 | 43 | 35 | 16 | 11 |
| 617457 | 38 | 32 | 27 | 18 |
| 617460 | 28 | 29 | 24 | 15 |
| 617461 | 40 | 19 | 11 | 12 |
| 617557 | 23 | 18 | 20 | 16 |

TABLE 40
Dose-dependent percent reduction of human
UBE3A-ATS RNA in vitro (60,000 cells/well)

| Compound | UBE3A-ATS expression (% UTC) | | | |
|---|---|---|---|---|
| Number | 740.7 nM | 2,222 nM | 6,666 nM | 20,000 nM |
| 617456 | 48 | 38 | 17 | 15 |
| 617457 | 35 | 27 | 18 | 18 |
| 617460 | 29 | 31 | 24 | 18 |
| 617461 | 38 | 24 | 13 | 12 |
| 617557 | 23 | 17 | 14 | 13 |

TABLE 41
Dose-dependent percent reduction of human
UBE3A-ATS RNA in vitro (60,000 cells/well)

| | UBE3A-ATS expression (% UTC) | | | | |
|---|---|---|---|---|---|
| Compound | | 2,222 | | | IC₅₀ |
| Number | 740.7 nM | nM | 6,666 nM | 20,000 nM | (μM) |
| 617456 | 41 | 26 | 15 | 20 | N.C. |
| 617557 | 69 | 43 | 24 | 30 | 1.9 |
| 749969 | 46 | 15 | 12 | 5 | N.C. |
| 749991 | 43 | 27 | 19 | 13 | N.C. |
| 750028 | 54 | 31 | 24 | 15 | N.C. |
| 750030 | 57 | 37 | 23 | 14 | 1.0 |
| 750032 | 40 | 18 | 14 | 7 | N.C. |
| 750326 | 76 | 60 | 38 | 25 | 3.8 |
| 750329 | 60 | 57 | 33 | 16 | 2.1 |
| 750344 | 63 | 77 | 49 | 29 | 5.6 |
| 750350 | 67 | 71 | 59 | 35 | 8.6 |
| 750359 | 110 | 56 | 38 | 41 | 6.7 |
| 750360 | 69 | 47 | 39 | 38 | 3.3 |
| 750365 | 58 | 60 | 38 | 22 | 2.4 |
| 750366 | 87 | 58 | 44 | 24 | 4.6 |
| 750386 | 76 | 57 | 42 | 40 | 5.3 |
| 750517 | 30 | 25 | 12 | 8 | N.C. |
| 750519 | 45 | 23 | 10 | 8 | N.C. |
| 750542 | 96 | 71 | 55 | 41 | 9.9 |
| 750549 | 92 | 54 | 40 | 24 | 4.3 |

TABLE 42
Dose-dependent percent reduction of human
UBE3A-ATS RNA in vitro (60,000 cells/well)

| Compound | UBE3A-ATS expression (% UTC) | | | | IC₅₀ |
|---|---|---|---|---|---|
| Number | 740.7 nM | 2,222 nM | 6,666 nM | 20,000 nM | (μM) |
| 617557 | 85 | 57 | 37 | 25 | 4.1 |
| 749861 | 47 | 31 | 25 | 14 | N.C. |
| 749863 | 83 | 52 | 34 | 23 | 3.5 |
| 749869 | 46 | 30 | 18 | 11 | N.C. |
| 749882 | 84 | 60 | 40 | 27 | 4.5 |
| 749885 | 61 | 53 | 31 | 20 | 2.0 |
| 749893 | 63 | 36 | 25 | 13 | 1.3 |
| 749894 | 28 | 21 | 10 | 11 | N.C. |
| 750040 | 78 | 59 | 46 | 32 | 5.1 |
| 750051 | 47 | 18 | 21 | 23 | N.C. |
| 750092 | 80 | 54 | 40 | 28 | 3.9 |
| 750100 | 82 | 67 | 59 | 51 | N.C. |
| 750270 | 43 | 34 | 25 | 21 | N.C. |
| 750292 | 58 | 37 | 28 | 26 | 1.0 |
| 750312 | 57 | 54 | 41 | 30 | 2.3 |
| 750325 | 101 | 94 | 68 | 46 | 18.4 |
| 750413 | 98 | 60 | 35 | 28 | 4.9 |
| 750416 | 94 | 48 | 38 | 15 | 3.7 |
| 750430 | 85 | 47 | 33 | 24 | 3.3 |
| 750431 | 136 | 125 | 90 | 62 | N.C. |

TABLE 43
Dose-dependent percent reduction of human
UBE3A-ATS RNA in vitro (35,000 cells/well)

| Compound | UBE3A-ATS expression (% UTC) | | | | IC₅₀ |
|---|---|---|---|---|---|
| Number | 740.7 nM | 2,222 nM | 6,666 nM | 20,000 nM | (μM) |
| 617459 | 118 | 69 | 33 | 20 | 5.4 |
| 617470 | 84 | 51 | 28 | 13 | 2.9 |
| 617473 | 44 | 33 | 30 | 20 | N.C. |
| 617536 | 100 | 54 | 57 | 24 | 5.9 |
| 617547 | 122 | 52 | 29 | 18 | 4.6 |
| 617593 | 81 | 75 | 32 | 21 | 4.2 |
| 749794 | 89 | 102 | 66 | 52 | N.C. |
| 750418 | 135 | 132 | 105 | 51 | N.C. |
| 750439 | 98 | 60 | 44 | 26 | 5.4 |
| 750452 | 113 | 94 | 78 | 51 | N.C. |

TABLE 44
Dose-dependent percent reduction of human
UBE3A-ATS RNA in vitro (35,000 cells/well)

| Compound | UBE3A-ATS expression (% UTC) | | | | IC₅₀ |
|---|---|---|---|---|---|
| Number | 740.7 nM | 2,222 nM | 6,666 nM | 20,000 nM | (μM) |
| 617557 | 129 | 53 | 32 | 28 | 5.5 |
| 749796 | 84 | 31 | 29 | 17 | 2.3 |
| 749816 | 94 | 56 | 46 | 22 | 4.8 |
| 749907 | 65 | 57 | 21 | 16 | 2.1 |
| 749921 | 50 | 47 | 25 | 18 | 1.0 |
| 749931 | 246 | 39 | 32 | 12 | 6.3 |
| 749933 | 51 | 41 | 26 | 11 | 0.9 |
| 749937 | 74 | 46 | 27 | 16 | 2.3 |
| 749944 | 116 | N/A | 74 | 40 | 15.3 |
| 749956 | 136 | 74 | 18 | 27 | 5.7 |
| 749964 | 75 | 80 | 35 | 17 | 4.2 |
| 750131 | 73 | 50 | 36 | 25 | 2.9 |
| 750139 | 35 | 29 | 21 | 15 | N.C. |
| 750140 | 27 | 27 | 13 | 11 | N.C. |
| 750141 | 52 | 61 | 25 | 24 | 1.6 |
| 750196 | 107 | 95 | 129 | 47 | N.C. |
| 750210 | 53 | 38 | 26 | 23 | 0.8 |
| 750214 | 34 | 70 | 47 | 41 | N.C. |
| 750228 | 109 | 105 | 95 | 70 | N.C. |
| 750242 | 77 | 70 | 36 | 15 | 3.8 |

TABLE 45
Dose-dependent percent reduction of human
UBE3A-ATS RNA in vitro (35,000 cells/well)

| Compound | UBE3A-ATS expression (% UTC) | | | | IC₅₀ |
|---|---|---|---|---|---|
| Number | 740.7 nM | 2,222 nM | 6,666 nM | 20,000 nM | (μM) |
| 617557 | 80 | 59 | 31 | 13 | 3.1 |
| 750519 | 87 | 67 | 41 | 27 | 5.2 |
| 1065438 | 120 | 90 | 88 | 95 | N.C. |
| 1065582 | 65 | 61 | 41 | 29 | 3.4 |
| 1065597 | 142 | 135 | 111 | 103 | N.C. |
| 1065599 | 63 | 47 | 47 | 26 | 2.5 |
| 1065613 | 96 | 70 | 65 | 39 | 11.5 |
| 1065631 | 60 | 61 | 48 | 26 | 3.4 |
| 1065644 | 64 | 65 | 42 | 27 | 3.8 |
| 1065645 | 68 | 50 | 36 | 19 | 2.4 |
| 1065646 | 52 | 55 | 34 | 16 | 1.5 |
| 1065676 | 50 | 38 | 33 | 23 | N.C. |
| 1065690 | 56 | 53 | 38 | 24 | 1.9 |
| 1065754 | 74 | 56 | 57 | 27 | 5.1 |
| 1065817 | 94 | 76 | 42 | 38 | 7.6 |
| 1065899 | 59 | 56 | 46 | 30 | 3.0 |
| 1066072 | 133 | 108 | 86 | 63 | N.C. |
| 1066249 | 73 | 60 | 70 | 48 | N.C. |
| 1066378 | 116 | 114 | 87 | 52 | N.C. |

TABLE 46
Dose-dependent percent reduction of human UBE3A-ATS RNA
by modified oligonucleotides in vitro (42,000 cells/well)

| Compound | UBE3A-ATS expression (% UTC) | | | | IC₅₀ |
|---|---|---|---|---|---|
| Number | 740.7 nM | 2,222 nM | 6,666 nM | 20,000 nM | (μM) |
| 617557 | 83 | 54 | 31 | 13 | 3.1 |
| 750519 | 63 | 48 | 43 | 26 | 2.4 |
| 1065578 | 77 | 36 | 36 | 24 | 2.4 |
| 1065579 | 55 | 58 | 30 | 66 | N.C. |
| 1065595 | 75 | 60 | 32 | 19 | 3.1 |
| 1065642 | 52 | 58 | 40 | 27 | 2.0 |
| 1065672 | 85 | 67 | 42 | 18 | 4.5 |
| 1065674 | 64 | 69 | 40 | 22 | 3.5 |
| 1065719 | 76 | 62 | 46 | 38 | 6.1 |
| 1065750 | 38 | 28 | 25 | 28 | N.C. |
| 1065766 | 78 | 52 | 32 | 37 | 3.7 |
| 1065768 | 86 | 66 | 43 | 30 | 5.5 |
| 1065799 | 66 | 52 | 41 | 34 | 3.2 |
| 1065863 | 54 | 60 | 46 | 27 | 2.6 |
| 1065894 | 82 | 100 | 52 | 52 | N.C. |
| 1066037 | 66 | 70 | 56 | 62 | N.C. |
| 1066119 | 82 | 116 | 101 | 72 | N.C. |
| 1066375 | 116 | 98 | 68 | 77 | N.C. |
| 1066423 | 39 | 70 | 63 | 46 | N.C. |

TABLE 47
Dose-dependent percent reduction of human
UBE3A-ATS RNA in vitro (42,000 cells/well)

| Compound | UBE3A-ATS expression (% UTC) | | | | IC₅₀ |
|---|---|---|---|---|---|
| Number | 740.7 nM | 2,222 nM | 6,666 nM | 20,000 nM | (μM) |
| 617557 | 65 | 52 | 23 | 8 | 1.9 |
| 1065324 | 86 | 90 | 67 | 43 | 18.4 |
| 1065369 | 107 | 91 | 108 | 83 | N.C. |
| 1065465 | 97 | 96 | 97 | 100 | N.C. |
| 1065513 | 156 | 104 | 66 | 70 | N.C. |
| 1065558 | 116 | 125 | 92 | 112 | N.C. |
| 1065592 | 85 | 84 | 50 | 23 | 6.5 |
| 1065624 | 87 | 71 | 39 | 20 | 4.7 |
| 1065667 | 64 | 59 | 35 | 21 | 2.7 |
| 1065747 | 91 | 65 | 55 | N/A | N.C. |
| 1065955 | 84 | 55 | 43 | 23 | 4.1 |
| 1066002 | 94 | 75 | 68 | 50 | N.C. |
| 1066003 | 90 | 73 | 49 | 43 | 9.5 |
| 1066034 | 137 | 120 | 101 | 67 | N.C. |
| 1066201 | 98 | 110 | 84 | 79 | N.C. |
| 1066273 | 101 | 95 | 108 | 104 | N.C. |
| 1066359 | 111 | 96 | 101 | 81 | N.C. |
| 1066420 | 70 | 43 | 27 | 33 | 2.2 |

TABLE 48
Dose-dependent percent reduction of human
UBE3A-ATS RNA in vitro (42,000 cells/well)

| Compound | UBE3A-ATS expression (% UTC) | | | | IC₅₀ |
|---|---|---|---|---|---|
| Number | 740.7 nM | 2,222 nM | 6,666 nM | 20,000 nM | (μM) |
| 617557 | 70 | 46 | 23 | 10 | 1.9 |
| 1065654 | 96 | 87 | 54 | 43 | 11.9 |
| 1065680 | 78 | 63 | 41 | 28 | 4.5 |
| 1065686 | 63 | 64 | 62 | 24 | 5.1 |
| 1065735 | 102 | 66 | 41 | 41 | 7.4 |
| 1065785 | 81 | 74 | 52 | 50 | 14.7 |
| 1065829 | 64 | 59 | 45 | 31 | 3.7 |
| 1065858 | 69 | 49 | 28 | 23 | 2.2 |
| 1065859 | 52 | 36 | 28 | 20 | N.C. |
| 1065901 | 89 | 69 | 73 | 55 | N.C. |
| 1065914 | 108 | 111 | 82 | 74 | N.C. |
| 1065977 | 106 | 87 | 101 | 76 | N.C. |
| 1066009 | 88 | 71 | 130 | 84 | N.C. |
| 1066046 | 84 | 59 | 43 | 36 | 5.5 |
| 1066089 | 46 | 71 | 58 | 41 | N.C. |
| 1066217 | 67 | 64 | 46 | 41 | 6.5 |
| 1066221 | 59 | 49 | 39 | 31 | 2.0 |
| 1066311 | 93 | 75 | 73 | 49 | N.C. |
| 1066377 | 94 | 73 | 51 | 35 | 7.9 |
| 1066396 | 100 | 75 | 82 | 54 | N.C. |

TABLE 49
Dose-dependent percent reduction of human
UBE3A-ATS RNA in vitro (42,000 cells/well)

| Compound | UBE3A-ATS expression (% UTC) | | | | IC₅₀ |
|---|---|---|---|---|---|
| Number | 740.7 nM | 2,222 nM | 6,666 nM | 20,000 nM | (μM) |
| 617557 | 66 | 47 | 21 | 6 | 1.7 |
| 750519 | 75 | 58 | 36 | 25 | 3.5 |
| 1065272 | 90 | 63 | 38 | 33 | 5.4 |
| 1065576 | 21 | 28 | 19 | 13 | N.C. |
| 1065590 | 74 | 49 | 31 | 27 | 2.8 |
| 1065591 | 83 | 60 | 29 | 13 | 3.2 |
| 1065607 | 68 | 47 | 28 | 17 | 2.1 |
| 1065608 | 72 | 38 | 18 | 13 | 1.7 |
| 1065623 | 46 | 28 | 21 | 13 | N.C. |
| 1065669 | 89 | 75 | 57 | 28 | 7.6 |
| 1065685 | 64 | 34 | 19 | 20 | 1.2 |
| 1065795 | 100 | 86 | 56 | 38 | 10.8 |
| 1065810 | 62 | 46 | 23 | 22 | 1.6 |
| 1065812 | 77 | 67 | 36 | 24 | 4.1 |
| 1065826 | 108 | 93 | 54 | 43 | 12.1 |
| 1065937 | 86 | 61 | 60 | 37 | 8.7 |
| 1065953 | 77 | 46 | 34 | 29 | 3.0 |
| 1065954 | 78 | 62 | 45 | 38 | 6.1 |
| 1066097 | 133 | 121 | 119 | 125 | N.C. |

TABLE 50
Dose-dependent percent reduction of human
UBE3A-ATS RNA in vitro (42,000 cells/well)

| Compound | UBE3A-ATS expression (% UTC) | | | | IC₅₀ |
|---|---|---|---|---|---|
| Number | 740.7 nM | 2,222 nM | 6,666 nM | 20,000 nM | (μM) |
| 617557 | 39 | 43 | 25 | 13 | N.C. |
| 750519 | 44 | 36 | 34 | 17 | N.C. |
| 1065605 | 50 | 48 | 29 | 19 | N.C. |
| 1065619 | 95 | 73 | 47 | 5 | 4.6 |
| 1065621 | 5 | 63 | 44 | 21 | 4.6 |
| 1065635 | 48 | 29 | 19 | 4 | N.C. |
| 1065651 | 13 | 8 | 29 | 10 | N.C. |
| 1065696 | 77 | 71 | 61 | 7 | 4.7 |
| 1065712 | 58 | 40 | 34 | 20 | 1.3 |
| 1065713 | 4 | 4 | 7 | 6 | N.C. |
| 1065728 | 73 | 54 | 42 | 25 | 3.5 |
| 1065823 | 7 | 9 | 10 | N/A | N.C. |
| 1065840 | 73 | 61 | 41 | 32 | 4.4 |
| 1065856 | 78 | 49 | 37 | 24 | 3.2 |
| 1065857 | 10 | 61 | 49 | 28 | 5.1 |
| 1065889 | 58 | 81 | 61 | 62 | N.C. |
| 1065903 | 85 | 65 | 60 | 6 | 4.6 |
| 1065920 | 53 | 42 | 40 | 26 | 1.0 |
| 1066350 | 89 | 101 | 78 | 21 | 11.3 |

TABLE 51
Dose-dependent percent reduction of human
UBE3A-ATS RNA in vitro (42,000 cells/well)

| Compound | UBE3A-ATS expression (% UTC) | | | | IC₅₀ |
|---|---|---|---|---|---|
| Number | 740.7 nM | 2,222 nM | 6,666 nM | 20,000 nM | (μM) |
| 617557 | 14 | 16 | 3 | 0 | N.C. |
| 750519 | 31 | 27 | 22 | 12 | N.C. |
| 1065296 | 78 | 56 | 45 | 7 | 3.2 |
| 1065330 | 13 | 5 | 4 | 3 | N.C. |
| 1065586 | 5 | 44 | 22 | 11 | N.C. |
| 1065600 | 79 | 55 | 36 | 4 | 2.9 |
| 1065616 | 84 | 75 | 65 | 5 | 5.4 |
| 1065708 | 9 | 8 | 6 | N/A | N.C. |
| 1065709 | 6 | 4 | 4 | 4 | N.C. |
| 1065710 | 52 | 33 | 16 | 9 | N.C. |
| 1065821 | 110 | 58 | 29 | 16 | 4.3 |
| 1065868 | 73 | 42 | 28 | 6 | 2.0 |
| 1065902 | 8 | 60 | 35 | 24 | 3.6 |
| 1065932 | 51 | 42 | 35 | 17 | 0.9 |
| 1065947 | 65 | 48 | 38 | 10 | 2.1 |
| 1066076 | 81 | 76 | 41 | 22 | 5.0 |
| 1066092 | 80 | 49 | 40 | 27 | 3.6 |
| 1066253 | 0 | 71 | 31 | 21 | 4.5 |
| 1066429 | 28 | 17 | 6 | 6 | N.C. |

TABLE 52
Dose-dependent percent reduction of human
UBE3A-ATS RNA in vitro (42,000 cells/well)

| Compound | UBE3A-ATS expression (% UTC) | | | | IC₅₀ |
|---|---|---|---|---|---|
| Number | 740.7 nM | 2,222 nM | 6,666 nM | 20,000 nM | (μM) |
| 617557 | 37 | 17 | 29 | 12 | N.C. |
| 750519 | 50 | 40 | 40 | 20 | N.C. |
| 1065295 | 78 | 73 | 74 | 49 | N.C. |
| 1065473 | 31 | 29 | 16 | 11 | N.C. |
| 1065503 | 105 | 107 | 107 | 77 | N.C. |
| 1065561 | 66 | 44 | 21 | 13 | 1.7 |
| 1065593 | 59 | 45 | 30 | 6 | 1.5 |
| 1065609 | 59 | 50 | 34 | 6 | 1.7 |
| 1065625 | 70 | 56 | 41 | 22 | 3.2 |
| 1065641 | 43 | 31 | 18 | 7 | N.C. |
| 1065671 | 55 | 49 | 30 | 8 | 1.4 |
| 1065678 | 75 | 78 | 54 | 33 | 8.0 |
| 1065765 | 64 | 46 | 28 | 12 | 1.8 |
| 1065791 | 7 | 58 | 44 | 30 | 4.1 |
| 1065806 | 24 | 72 | 82 | 74 | N.C. |
| 1065813 | 12 | 11 | 11 | 7 | N.C. |
| 1065924 | 107 | 94 | 79 | 41 | 18.4 |
| 1066011 | 94 | 85 | 83 | 50 | N.C. |
| 1066220 | 24 | 83 | 75 | 62 | N.C. |

TABLE 53
Dose-dependent percent reduction of human
UBE3A-ATS RNA in vitro (40,000 cells/well)

| Compound | UBE3A-ATS expression (% UTC) | | | | IC₅₀ |
|---|---|---|---|---|---|
| Number | 740.7 nM | 2,222 nM | 6,666 nM | 20,000 nM | (μM) |
| 750519 | 83 | 53 | 21 | 14 | 2.8 |
| 1165521 | 55 | 38 | 32 | 27 | 0.9 |
| 1165524 | 42 | 33 | 26 | 14 | N.C. |
| 1165536 | 47 | 39 | 32 | 21 | N.C. |
| 1165545 | 62 | 49 | 32 | 33 | 2.0 |
| 1165552 | 53 | 35 | 24 | 16 | 0.8 |
| 1165553 | 55 | 34 | 24 | 18 | 0.8 |
| 1165554 | 63 | 55 | 29 | 19 | 2.1 |
| 1165555 | 53 | 43 | 21 | 22 | 0.9 |
| 1165562 | 72 | 69 | 35 | 23 | 3.8 |
| 1165577 | 65 | 59 | 33 | 28 | 2.8 |
| 1165588 | 78 | 57 | 33 | 38 | 4.3 |
| 1165590 | 44 | 41 | 30 | 21 | N.C. |
| 1165593 | 85 | 92 | 83 | 50 | N.C. |
| 1165611 | 47 | 39 | 25 | 21 | N.C. |
| 1165724 | 80 | 71 | 57 | 54 | N.C. |
| 1165788 | 66 | 71 | 42 | 25 | 4.2 |
| 1165798 | 73 | 81 | 86 | 52 | N.C. |
| 1179842 | 78 | 37 | 27 | 20 | 2.2 |

### Example 5: Effect of Modified Oligonucleotides on Human UBE3A-ATS RNA In Vitro, Multiple Doses

[0467] Modified oligonucleotides selected from the examples above were tested at various doses in human IPS derived ReproNeuro™ Neurons (ReproCELL). Cells were plated at a density of 20,000 cells per well, maintained per manufacturer instructions, and treated with modified oligonucleotides by free uptake at various concentrations as specified in the tables below. After a treatment period of approximately 5 days, total RNA was isolated from the cells and UBE3A-ATS RNA levels were measured by quantitative real-time PCR. Human UBE3A-ATS primer probe set RTS4796, described hereinabove, was used to measure RNA levels. UBE3A-ATS RNA levels were normalized according to total RNA content, as measured by RIBOGREEN®. Reduction of UBE3A-ATS RNA is presented in the tables below as percent UBE3A-ATS RNA amount relative to untreated control (UTC) cells.

[0468] The half maximal inhibitory concentration (IC₅₀) of each modified oligonucleotide was calculated using a linear regression on a log/linear plot of the data in excel. In cases where IC₅₀ could not be calculated, IC₅₀s are marked as N.C. (Not Calculated).

TABLE 54
Dose-dependent percent reduction
of human UBE3A-ATS RNA in vitro

| Compound | UBE3A-ATS expression (% UTC) | | | | IC₅₀ |
|---|---|---|---|---|---|
| Number | 740.7 nM | 2,222 nM | 6,666 nM | 20,000 nM | (μM) |
| 750519 | 73 | 54 | 19 | 11 | 2.3 |
| 1165523 | 75 | 60 | 43 | 33 | 4.7 |
| 1165533 | 60 | 50 | 18 | 33 | 1.5 |
| 1165538 | 64 | 47 | 34 | 26 | 2.1 |
| 1165550 | 65 | 62 | 47 | 32 | 4.5 |
| 1165563 | 69 | 51 | 41 | 29 | 3.1 |
| 1165586 | 62 | 50 | 35 | 32 | 2.3 |
| 1165596 | 88 | 72 | 69 | 43 | 16.4 |
| 1165608 | 88 | 89 | 62 | 54 | N.C. |
| 1165616 | 89 | 88 | 80 | 74 | N.C. |
| 1165694 | 71 | 57 | 55 | 50 | 15.0 |
| 1165737 | 71 | 55 | 53 | 46 | 9.1 |
| 1165827 | 72 | 59 | 65 | 42 | 13.6 |
| 1165855 | 60 | 60 | 37 | 19 | 2.5 |
| 1165897 | 78 | 76 | 54 | 50 | N.C. |
| 1179808 | 101 | 100 | 85 | 75 | N.C. |
| 1179839 | 58 | 41 | 26 | 23 | 1.2 |
| 1179841 | 68 | 45 | 38 | 26 | 2.4 |
| 1179843 | 52 | 57 | 36 | 21 | 1.7 |

### Example 6: Effect of Modified Oligonucleotides on Human UBE3A-ATS RNA and UBE3A RNA In Vitro, Multiple Doses

[0469] Modified oligonucleotides selected from the examples above were tested at various doses in 10-week differentiated human neuronal cells derived from Angelman Syndrome patient derived IPS cells (Protocols and cells described in Chamberlain S J., et al., Induced pluripotent stem cell models of the genomic imprinting disorders Angelman and Prader-Willi syndromes. PNAS, 2010. 41: 17668-17673). At the end of the 10-week differentiation period, cells were treated with modified oligonucleotides by free uptake at various concentrations as specified in the tables below. After a treatment period of approximately 6 days, total RNA was isolated from the cells. Both UBE3A-ATS RNA and UBE3A RNA levels were measured by quantitative real-time PCR. Human UBE3A-ATS primer probe set RTS4796 was used to measure UBE3A-ATS RNA levels as described above. Human UBE3A primer probe set RTS35984 (forward sequence CACCCTGATGTCACCGAATG, designated herein as SEQ ID NO: 8; reverse sequence GCGTTCTATTAGATGCTTTGCAG, designated herein as SEQ ID NO: 9; probe sequence ACTGAGGTTCTCCTGATCTTTTACAAGCTG, designated herein as SEQ ID NO: 10) was used to measure UBE3A RNA levels. RNA levels were adjusted according to total RNA content, as measured by RIBOGREEN®. Reduction of UBE3A-ATS RNA or induction of UBE3A RNA is presented in the tables below as percent UBE3A-ATS RNA amount or percent UBE3A RNA relative to untreated control (UTC) cells. Values marked with “N.D.” indicate that a value was not determined in this experiment.

[0470] Several modified oligonucleotides were found to reduce UBE3A-ATS RNA accompanied by concurrent increase in UBE3A RNA in Angelman's patient IPS cell derived neurons.

TABLE 55
Reduction of UBE3A-ATS RNA and increase of UBE3A
RNA in Angelman Syndrome IPS cell derived neurons

| | UBE3A-ATS RNA | | | UBE3A RNA | | |
|---|---|---|---|---|---|---|
| | (% UTC) (RTS4796) | | | (% UTC) (RTS35984) | | |
| Compound | 741 | 2222 | 6667 | 741 | 2222 | 6667 |
| ID | nM | nM | nM | nM | nM | nM |
| 617557 | 17 | 16 | N.D. | 142 | 151 | N.D. |
| 750140 | 7 | N.D. | N.D. | 226 | N.D. | N.D. |
| 750139 | 35 | 10 | 3 | 104 | 196 | 194 |
| 750131 | 29 | 25 | N.D. | 49 | 53 | N.D. |
| 750141 | 22 | N.D. | N.D. | 89 | N.D. | N.D. |
| 750242 | 42 | N.D. | N.D. | 45 | N.D. | N.D. |
| 750210 | 49 | 14 | 6 | 122 | 101 | 166 |
| 750214 | 53 | 56 | 13 | 87 | 154 | 85 |
| 749907 | 16 | 13 | 7 | 133 | 298 | 205 |
| 749931 | 35 | 17 | 11 | 152 | 271 | 260 |
| 749964 | 27 | 15 | 6 | 144 | 160 | 202 |
| 749921 | 25 | 12 | N.D. | 73 | 98 | N.D. |
| 749933 | 42 | 10 | 13 | 116 | 92 | 210 |
| 749956 | 51 | 33 | N.D. | 94 | 103 | N.D. |
| 749937 | 52 | 27 | 7 | 104 | 131 | 137 |
| 749796 | 73 | 67 | N.D. | 81 | 79 | N.D. |
| 749816 | 75 | N.D. | 19 | 63 | N.D. | 27 |
| 749969 | 33 | 14 | 10 | 171 | 249 | 305 |
| 749991 | 32 | 15 | 15 | 193 | 165 | 276 |

TABLE 56
Reduction of UBE3A-ATS RNA and increase of UBE3A
RNA in Angelman Syndrome IPS cell derived neurons

| | UBE3A-ATS RNA | | | UBE3A RNA | | |
|---|---|---|---|---|---|---|
| | (% UTC) (RTS4796) | | | (% UTC) (RTS35984) | | |
| Compound | 741 | 2222 | 6667 | 741 | 2222 | 6667 |
| ID | nM | nM | nM | nM | nM | nM |
| 617557 | 54 | 51 | 39 | 144 | 365 | 252 |
| 750140 | 22 | 37 | N.D. | 345 | 328 | N.D. |
| 750517 | 34 | 30 | 19 | 269 | 328 | 418 |
| 750549 | 60 | 72 | 72 | 337 | 225 | 309 |
| 750542 | 64 | 70 | 22 | 98 | 113 | 234 |
| 617456 | 58 | 35 | 26 | 142 | 176 | 253 |
| 750519 | 33 | 26 | 18 | 374 | 440 | 447 |
| 750360 | 93 | 113 | 59 | 151 | 221 | 204 |
| 750359 | 32 | 31 | 27 | 267 | 134 | 229 |
| 750386 | 35 | 40 | 17 | 182 | 282 | 320 |
| 750366 | 77 | 45 | 37 | 87 | 122 | 185 |
| 750344 | 51 | 50 | 30 | 91 | 139 | 150 |
| 750326 | 67 | 49 | 31 | 106 | 108 | 166 |
| 750350 | 68 | 66 | 102 | 111 | 132 | 138 |
| 750365 | 74 | 63 | 37 | 122 | 160 | 183 |
| 750329 | 88 | 82 | N.D. | 154 | 148 | N.D. |
| 750028 | 81 | N.D. | 14 | 324 | N.D. | 448 |
| 750030 | 87 | 30 | 22 | 221 | 307 | 373 |
| 750032 | 47 | 17 | 13 | 202 | 323 | 254 |

TABLE 57
Reduction of UBE3A-ATS RNA and increase of UBE3A
RNA in Angelman Syndrome IPS cell derived neurons

| | UBE3A-ATS RNA | | | UBE3A RNA | | |
|---|---|---|---|---|---|---|
| | (% UTC) (RTS4796) | | | (% UTC) (RTS35984) | | |
| Compound | 741 | 2222 | 6667 | 741 | 2222 | 6667 |
| ID | nM | nM | nM | nM | nM | nM |
| 617557 | 28 | 54 | N.D. | 318 | 411 | N.D. |
| 750140 | 19 | 20 | 10 | 619 | 542 | 132 |
| 750040 | 38 | 49 | 25 | 171 | 192 | 318 |
| 750051 | 21 | 21 | 13 | 106 | 544 | 416 |
| 750092 | 40 | 32 | 12 | 175 | 507 | 118 |
| 749894 | 12 | 19 | 6 | 143 | 2085 | 605 |
| 749869 | 10 | 11 | 13 | 376 | 802 | 1504 |
| 749882 | 34 | 31 | 19 | 502 | 907 | 926 |
| 749863 | 45 | 42 | 22 | 326 | 2584 | 927 |
| 749893 | 34 | 10 | 7 | 215 | 428 | 1023 |
| 749885 | 22 | 12 | 10 | 105 | 233 | 614 |
| 749861 | 19 | 11 | 8 | 209 | 236 | 466 |
| 750292 | 28 | 15 | 13 | 123 | 318 | 645 |
| 750270 | 18 | 14 | 10 | 267 | 578 | 584 |
| 750312 | 39 | 19 | 12 | 87 | 289 | 420 |
| 750413 | 46 | 49 | 20 | 123 | 375 | 143 |
| 750416 | 49 | N.D. | N.D. | 119 | N.D. | N.D. |
| 750430 | 33 | 21 | 12 | 329 | 359 | 241 |
| 750439 | 40 | 31 | 19 | 188 | 197 | 183 |

TABLE 58
Reduction of UBE3A-ATS RNA and increase of UBE3A
RNA in Angelman Syndrome IPS cell derived neurons

| | UBE3A-ATS RNA | | | UBE3A RNA | | |
|---|---|---|---|---|---|---|
| | (% UTC) (RTS4796) | | | (% UTC) (RTS35984) | | |
| Compound | 741 | 2222 | 6667 | 741 | 2222 | 6667 |
| ID | nM | nM | nM | nM | nM | nM |
| 617557 | 60 | 39 | N.D. | 266 | 161 | N.D. |
| 617557 | 65 | 23 | 8 | 229 | 204 | 122 |
| 750140 | 18 | 29 | N.D. | 312 | 222 | N.D. |
| 617470 | 36 | 34 | 23 | 141 | 191 | 317 |
| 617473 | 29 | 37 | 20 | 91 | 162 | 87 |
| 617459 | 38 | 18 | 8 | 80 | 155 | 191 |
| 617547 | 31 | 19 | 28 | 52 | 145 | 226 |
| 617536 | 83 | 28 | 109 | 165 | 108 | 265 |
| 617593 | 67 | 142 | 107 | 100 | 73 | 83 |
| 750544 | 98 | 107 | 51 | 221 | 258 | 307 |
| 750554 | 65 | 72 | 88 | 57 | 80 | 55 |
| 750540 | 46 | 26 | 29 | 202 | 344 | 458 |
| 750567 | 62 | 49 | 31 | 86 | 108 | 227 |
| 749984 | 47 | 42 | N.D. | 68 | 99 | 277 |
| 750009 | 31 | 39 | 22 | 65 | 92 | 217 |
| 749865 | 44 | N.D. | 12 | 201 | N.D. | 249 |
| 749860 | 36 | 22 | 9 | 285 | 265 | 263 |
| 750006 | 32 | 17 | 66 | 241 | 329 | 513 |
| 582468 | 102 | 79 | 33 | 120 | 33 | 62 |
| 141923 | 150 | 169 | 100 | 135 | 126 | 53 |

TABLE 59
Reduction of UBE3A-ATS RNA and increase of UBE3A
RNA in Angelman Syndrome IPS cell derived neurons

| | UBE3A-ATS RNA | | | | UBE3A RNA | | | |
|---|---|---|---|---|---|---|---|---|
| Com- | (% UTC) (RTS4796) | | | | (% UTC) (RTS35984) | | | |
| pound | 741 | 2222 | 6667 | 20000 | 741 | 2222 | 6667 | 20000 |
| ID | nM | nM | nM | nM | nM | nM | nM | nM |
| 749894 | 20 | 13 | 11 | 10 | 301 | 200 | 159 | 546 |
| 749969 | 47 | 44 | 45 | 51 | 125 | 88 | 85 | 205 |
| 750032 | 16 | 17 | 12 | 17 | 215 | 190 | 182 | 236 |
| 750140 | 26 | 33 | 13 | 22 | 252 | 429 | 160 | 222 |
| 1065690 | 18 | 7 | 11 | 9 | 313 | 295 | 203 | 254 |
| 1065868 | 32 | 17 | 9 | 9 | 249 | 303 | 211 | 143 |
| 1065579 | 20 | 19 | 25 | 7 | 155 | 134 | 133 | 231 |
| 1065858 | 22 | 24 | 25 | 17 | 190 | 239 | 229 | 249 |
| 1065859 | 55 | 57 | 36 | 29 | 117 | 141 | 199 | 193 |
| 1065812 | 25 | 29 | 9 | 10 | 133 | 120 | 185 | 163 |
| 749860 | 35 | 21 | 14 | 11 | 129 | 250 | 196 | 278 |
| 1065593 | 18 | 10 | 7 | 9 | 228 | 181 | 211 | 261 |
| 1065953 | 15 | 11 | 12 | 10 | 148 | 269 | 243 | 221 |
| 1065856 | 15 | 18 | 11 | 9 | 292 | 286 | 103 | 234 |
| 1065937 | 21 | 26 | 12 | 10 | 93 | 205 | 225 | 208 |
| 1065728 | 35 | 24 | 20 | 12 | 132 | 143 | 144 | 198 |
| 750139 | 38 | 28 | 13 | 14 | 176 | 229 | 248 | 315 |
| 617557 | 55 | 23 | 30 | 33 | 166 | 206 | 193 | 226 |
| 750519 | 15 | 15 | 5 | 3 | 173 | 101 | 220 | 324 |

TABLE 60
Reduction of UBE3A-ATS RNA and increase of UBE3A
RNA in Angelman Syndrome IPS cell derived neurons

| | UBE3A-ATS RNA | | | | UBE3A RNA | | | |
|---|---|---|---|---|---|---|---|---|
| Com- | (% UTC) (RTS4796) | | | | (% UTC) (RTS35984) | | | |
| pound | 741 | 2222 | 6667 | 20000 | 741 | 2222 | 6667 | 20000 |
| ID | nM | nM | nM | nM | nM | nM | nM | nM |
| 1066092 | 138 | 160 | 98 | 55 | 247 | 253 | 254 | 111 |
| 1065902 | 92 | 85 | 55 | 42 | 168 | 231 | 203 | 304 |
| 1065840 | 57 | 54 | 37 | 22 | 209 | 176 | 141 | 307 |
| 1066253 | 77 | 37 | 52 | 36 | 182 | 167 | 184 | 236 |
| 1065785 | 93 | 35 | 41 | 54 | 155 | 198 | 225 | 240 |
| 1065821 | 40 | 19 | 20 | 20 | 220 | 288 | 215 | 276 |
| 750006 | 78 | 33 | 33 | 56 | 132 | 119 | 168 | 185 |
| 750028 | 36 | 17 | 16 | 19 | 173 | 235 | 189 | 216 |
| 617557 | 37 | 26 | 13 | 23 | 194 | 166 | 214 | 241 |

TABLE 61
Reduction of UBE3A-ATS RNA and increase of UBE3A
RNA in Angelman Syndrome IPS cell derived neurons

| | UBE3A-ATS RNA | | | | UBE3A RNA | | | |
|---|---|---|---|---|---|---|---|---|
| | (% UTC) (RTS4796) | | | | (% UTC) (RTS35984) | | | |
| | 741 | 2222 | 6667 | 20000 | 741 | 2222 | 6667 | 20000 |
| Compound ID | nM | nM | nM | nM | nM | nM | nM | nM |
| 750519 | 41 | 26 | 11 | 8 | 138 | 158 | 148 | 158 |
| 1065671 | 106 | 81 | 108 | 61 | 213 | 189 | 387 | 235 |
| 617557 | 69 | 52 | 37 | 35 | 129 | 132 | 210 | 195 |
| 1065686 | 101 | 101 | 81 | 88 | 145 | 105 | 118 | 164 |
| 750359 | 121 | 70 | 79 | 48 | 108 | 119 | 134 | 131 |
| 1065817 | 75 | 78 | 40 | N.D. | 119 | 174 | 131 | N.D. |
| 750386 | 100 | 65 | 58 | 50 | 106 | 155 | 190 | 128 |
| 749894 | 58 | 40 | 19 | 20 | 176 | 187 | 159 | 244 |
| 1065591 | 68 | 51 | 52 | 34 | 138 | 132 | 227 | 155 |
| 750140 | 178 | 165 | 133 | 129 | 129 | 117 | 98 | 142 |
| 750032 | 95 | 56 | 40 | 31 | 109 | 144 | 126 | 172 |
| 1065599 | 73 | 45 | 42 | 33 | 135 | 131 | 188 | 210 |
| 1065690 | 66 | 48 | 35 | 29 | 182 | 175 | 211 | 185 |
| 1065868 | 132 | 125 | 107 | 90 | 93 | 125 | 113 | 99 |
| 1065645 | 83 | 47 | 50 | 25 | 169 | 144 | 287 | 158 |
| 1065858 | 78 | 46 | 22 | 18 | 175 | 192 | 162 | 227 |
| 1065856 | 76 | 66 | 49 | 35 | 138 | 195 | 167 | 165 |
| 1065667 | 137 | 127 | 137 | 94 | 115 | 116 | 163 | 134 |
| 1066092 | 133 | 126 | 87 | 75 | 100 | 113 | 104 | 106 |

### Example 7: Design and Synthesis of Modified Oligonucleotides Complementary to a Human UBE3A-ATS Nucleic Acid

[0471] Modified oligonucleotides were synthesized as indicated in the tables below.

[0472] The compounds in Table 62 are 4-10-6 MOE gapmers. The gapmers are 20 nucleosides in length, wherein the central gap segment consists of ten 2′-β-D-deoxynucleosides, the 5′ wing segment consists of four 2′-MOE nucleosides, and the 3′ wing segment consists of six 2′-MOE nucleosides. The sugar motif of the gapmers is (from 5′ to 3′): eeeeddddddddddeeeeee; wherein ‘d’ represents a 2′-β-D-deoxyriboxyl sugar moiety, and ‘e’ represents a 2′-MOE sugar moiety. The gapmers have an internucleoside linkage motif of (from 5′ to 3′): sooossssssssssoooss; wherein “s” represents a phosphorothioate internucleoside linkage and “o” represents a phosphodiester internucleoside linkage. All cytosine residues are 5-methylcytosines.

TABLE 62
4-10-6 MOE gapmers with a mixed PO/PS
internucleoside linkages complementary
to human UBE3A-ATS

| | SEQ | SEQ | | |
|---|---|---|---|---|
| | ID | ID | | |
| | NO: 1 | NO: 1 | | SEQ |
| Compound | Start | Stop | | ID |
| ID | Site | Site | SEQUENCE | NO |
| 1263473 | 460996 | 461015 | TTTTTCCATTTTTCTCTTAG | 2745 |
| 1263474 | 460997 | 461016 | GTTTTTCCATTTTTCTCTTA | 2746 |
| 1263475 | 460999 | 461018 | GTGTTTTTCCATTTTTCTCT | 598 |
| 1263476 | 461000 | 461019 | TGTGTTTTTCCATTTTTCTC | 2747 |
| 1263477 | 461001 | 461020 | GTGTGTTTTTCCATTTTTCT | 2748 |
| 1263478 | 461002 | 461021 | TGTGTGTTTTTCCATTTTTC | 2749 |
| 1263479 | 465235 | 465254 | TCATCTCGGGTATATAAATT | 2750 |
| 1263480 | 465236 | 465255 | GTCATCTCGGGTATATAAAT | 1132 |
| 1263481 | 465237 | 465256 | GGTCATCTCGGGTATATAAA | 1207 |
| 1263482 | 465238 | 465257 | TGGTCATCTCGGGTATATAA | 318 |
| 1263483 | 465239 | 465258 | TTGGTCATCTCGGGTATATA | 2473 |
| 1263484 | 465240 | 465259 | ATTGGTCATCTCGGGTATAT | 1655 |
| 1263485 | 465241 | 465260 | TATTGGTCATCTCGGGTATA | 2548 |
| 1263486 | 468985 | 469004 | TCACCATTTTGACCTTCTTA | 2751 |
| 1263487 | 468986 | 469005 | TTCACCATTTTGACCTTCTT | 2752 |
| 1263488 | 468987 | 469006 | CTTCACCATTTTGACCTTCT | 2753 |
| 1263489 | 468988 | 469007 | GCTTCACCATTTTGACCTTC | 377 |
| 1263490 | 468989 | 469008 | TGCTTCACCATTTTGACCTT | 2754 |
| 1263491 | 468990 | 469009 | CTGCTTCACCATTTTGACCT | 2755 |
| 1263492 | 468991 | 469010 | ACTGCTTCACCATTTTGACC | 2756 |
| 1263494 | 464526 | 464545 | TCAGTTAGGTTAGTGCACAG | 2757 |
| 1263495 | 464527 | 464546 | CTCAGTTAGGTTAGTGCACA | 2758 |
| 1263496 | 464528 | 464547 | GCTCAGTTAGGTTAGTGCAC | 1504 |
| 1263497 | 464529 | 464548 | TGCTCAGTTAGGTTAGTGCA | 2759 |
| 1263498 | 464530 | 464549 | CTGCTCAGTTAGGTTAGTGC | 2729 |
| 1263499 | 464531 | 464550 | TCTGCTCAGTTAGGTTAGTG | 2760 |
| 1263500 | 479994 | 480013 | GAGCTATCTGTACAAAATGG | 2761 |
| 1263501 | 479995 | 480014 | TGAGCTATCTGTACAAAATG | 2743 |
| 1263502 | 479996 | 480015 | GTGAGCTATCTGTACAAAAT | 2744 |
| 1263503 | 479997 | 480016 | CGTGAGCTATCTGTACAAAA | 1142 |
| 1263532 | 483970 | 483989 | GCATACCCAGGGTAGGATTC | 765 |
| 1263534 | 483971 | 483990 | TGCATACCCAGGGTAGGATT | 1445 |
| 1263536 | 483972 | 483991 | GTGCATACCCAGGGTAGGAT | 766 |
| 1263539 | 483973 | 483992 | TGTGCATACCCAGGGTAGGA | 2762 |
| 1263541 | 483974 | 483993 | ATGTGCATACCCAGGGTAGG | 2595 |
| 1273009 | 457735 | 457754 | GCCAGGTGTCTTATATCTAT | 2852 |
| 1273010 | 474393 | 474412 | GGTCAACCAATTTGCTATTC | 1809 |
| 1273011 | 474394 | 474413 | AGGTCAACCAATTTGCTATT | 2853 |
| 1273012 | 474396 | 474415 | TTAGGTCAACCAATTTGCTA | 2854 |
| 1273013 | 457736 | 457755 | AGCCAGGTGTCTTATATCTA | 2855 |
| 1273014 | 478535 | 478554 | AACGCAATGTATCAGGCAAC | 2856 |
| 1273015 | 478536 | 478555 | AAACGCAATGTATCAGGCAA | 2857 |
| 1273016 | 478730 | 478749 | GATCACATTACCCATCCGTT | 2858 |
| 1273017 | 478731 | 478750 | TGATCACATTACCCATCCGT | 2859 |
| 1273018 | 478732 | 478751 | CTGATCACATTACCCATCCG | 2860 |
| 1273019 | 474395 | 474414 | TAGGTCAACCAATTTGCTAT | 2861 |
| 1273020 | 478733 | 478752 | GCTGATCACATTACCCATCC | 1291 |
| 1273021 | 478734 | 478753 | TGCTGATCACATTACCCATC | 2862 |
| 1273022 | 478735 | 478754 | TTGCTGATCACATTACCCAT | 2863 |

[0473] The compounds in Table 63 are 5-10-5 MOE gapmers. The gapmers are 20 nucleosides in length, wherein the central gap segment consists of ten 2′-β-D-deoxyribonucleosides and the 5′ and 3′ wing segments each consist of five 2′-MOE nucleosides. The sugar motif for the gapmers is (from 5′ to 3′): eeeeeddddddddddeeeee; wherein ‘d’ represents a 2′-β-D-deoxyribosyl sugar moiety, and ‘e’ represents a 2′-MOE sugar moiety The gapmers have an internucleoside linkage motif of (from 5′ to 3′): soooossssssssssooss, wherein “s” represents a phosphorothioate internucleoside linkage and “o” represents a phosphodiester internucleoside linkage. All cytosine residues are 5-methylcytosines.

TABLE 63
5-10-5 MOE gapmers with a mixed
PO/PS internucleoside linkages
complementary to human UBE3A-ATS

| | SEQ | SEQ | | |
|---|---|---|---|---|
| | ID | ID | | |
| | NO: 1 | NO: 1 | | SEQ |
| Compound | Start | Stop | | ID |
| ID | Site | Site | SEQUENCE | NO |
| 1263451 | 460996 | 461015 | TTTTTCCATTTTTCTCTTAG | 2745 |
| 1263452 | 460997 | 461016 | GTTTTTCCATTTTTCTCTTA | 2746 |
| 1263453 | 461000 | 461019 | TGTGTTTTTCCATTTTTCTC | 2747 |
| 1263454 | 461001 | 461020 | GTGTGTTTTTCCATTTTTCT | 2748 |
| 1263455 | 461002 | 461021 | TGTGTGTTTTTCCATTTTTC | 2749 |
| 1263456 | 465235 | 465254 | TCATCTCGGGTATATAAATT | 2750 |
| 1263460 | 468985 | 469004 | TCACCATTTTGACCTTCTTA | 2751 |
| 1263461 | 468986 | 469005 | TTCACCATTTTGACCTTCTT | 2752 |
| 1263462 | 468987 | 469006 | CTTCACCATTTTGACCTTCT | 2753 |
| 1263463 | 468989 | 469008 | TGCTTCACCATTTTGACCTT | 2754 |
| 1263464 | 468990 | 469009 | CTGCTTCACCATTTTGACCT | 2755 |
| 1263465 | 468991 | 469010 | ACTGCTTCACCATTTTGACC | 2756 |
| 1263466 | 464526 | 464545 | TCAGTTAGGTTAGTGCACAG | 2757 |
| 1263467 | 464527 | 464546 | CTCAGTTAGGTTAGTGCACA | 2758 |
| 1263468 | 464529 | 464548 | TGCTCAGTTAGGTTAGTGCA | 2759 |
| 1263469 | 464531 | 464550 | TCTGCTCAGTTAGGTTAGTG | 2760 |
| 1263470 | 479994 | 480013 | GAGCTATCTGTACAAAATGG | 2761 |
| 1263471 | 479995 | 480014 | TGAGCTATCTGTACAAAATG | 2743 |
| 1263472 | 479996 | 480015 | GTGAGCTATCTGTACAAAAT | 2744 |
| 1263538 | 483973 | 483992 | TGTGCATACCCAGGGTAGGA | 2762 |
| 1272943 | 467048 | 467067 | TTTCATCAGTTAGTCAGGTT | 2786 |
| 1272944 | 465605 | 465624 | CCTTTCTATTTCAGACCGAA | 2787 |
| 1272945 | 465607 | 465626 | TGCCTTTCTATTTCAGACCG | 2788 |
| 1272946 | 465608 | 465627 | GTGCCTTTCTATTTCAGACC | 2789 |
| 1272947 | 465609 | 465628 | AGTGCCTTTCTATTTCAGAC | 2790 |
| 1272948 | 468919 | 468938 | AGTATAGATGCCTCTCCTCT | 2791 |
| 1272949 | 468920 | 468939 | AAGTATAGATGCCTCTCCTC | 2792 |
| 1272950 | 468921 | 468940 | TAAGTATAGATGCCTCTCCT | 2793 |
| 1272951 | 474796 | 474815 | ATTGACACCTCCAACTGTAA | 2794 |
| 1272952 | 474798 | 474817 | GTATTGACACCTCCAACTGT | 2795 |
| 1272953 | 474800 | 474819 | TGGTATTGACACCTCCAACT | 2796 |
| 1272954 | 474801 | 474820 | TTGGTATTGACACCTCCAAC | 2797 |
| 1272955 | 474802 | 474821 | TTTGGTATTGACACCTCCAA | 2798 |
| 1272956 | 476012 | 476031 | GTTTTCGCCCGTTACCTCAA | 2799 |
| 1272957 | 476013 | 476032 | AGTTTTCGCCCGTTACCTCA | 2800 |
| 1272958 | 476014 | 476033 | CAGTTTTCGCCCGTTACCTC | 2801 |
| 1272959 | 476017 | 476036 | CTCCAGTTTTCGCCCGTTAC | 2802 |
| 1272960 | 467052 | 467071 | ACACTTTCATCAGTTAGTCA | 2803 |
| 1272961 | 476018 | 476037 | TCTCCAGTTTTCGCCCGTTA | 2804 |
| 1272962 | 478437 | 478456 | GCTATAGGTGTCACATATTC | 2805 |
| 1272963 | 478442 | 478461 | TTGTAGCTATAGGTGTCACA | 2806 |
| 1272964 | 478443 | 478462 | TTTGTAGCTATAGGTGTCAC | 2807 |
| 1272965 | 483106 | 483125 | GCAATGGACTTAGTACACAA | 2808 |
| 1272966 | 483107 | 483126 | GGCAATGGACTTAGTACACA | 2809 |
| 1272967 | 483110 | 483129 | TTAGGCAATGGACTTAGTAC | 2810 |
| 1272968 | 483111 | 483130 | CTTAGGCAATGGACTTAGTA | 2811 |
| 1272969 | 485766 | 485785 | CAGATTCCTAAATACGCACA | 2812 |
| 1272970 | 485767 | 485786 | TCAGATTCCTAAATACGCAC | 2813 |
| 1272971 | 485768 | 485787 | GTCAGATTCCTAAATACGCA | 2814 |
| 1272972 | 485771 | 485790 | GTGGTCAGATTCCTAAATAC | 2815 |
| 1272973 | 487601 | 487620 | AGTGTCATATGTAGCAATTA | 2816 |
| 1272974 | 487603 | 487622 | TTAGTGTCATATGTAGCAAT | 2817 |
| 1272975 | 501337 | 501356 | TATGTAGCTCAGCTCAATGT | 2818 |
| 1272976 | 501339 | 501358 | CTTATGTAGCTCAGCTCAAT | 2819 |
| 1272977 | 501342 | 501361 | CTGCTTATGTAGCTCAGCTC | 2820 |
| 1272978 | 468734 | 468753 | AAAATCCATTTGTCCAGTCT | 2821 |
| 1272979 | 505552 | 505571 | TTTGCTTTTCAGTCAGGTAC | 2822 |
| 1272980 | 468735 | 468754 | TAAAATCCATTTGTCCAGTC | 2823 |
| 1272981 | 468736 | 468755 | CTAAAATCCATTTGTCCAGT | 2824 |
| 1272982 | 506110 | 506129 | GCATTGGCTTCATATTTCTC | 2825 |
| 1272983 | 506112 | 506131 | GAGCATTGGCTTCATATTTC | 2826 |
| 1272984 | 508942 | 508961 | CATTATTCTCTAGTGCCTAT | 2827 |
| 1272985 | 508943 | 508962 | TCATTATTCTCTAGTGCCTA | 2828 |
| 1272986 | 508947 | 508966 | GTCTTCATTATTCTCTAGTG | 2829 |
| 1272987 | 508948 | 508967 | AGTCTTCATTATTCTCTAGT | 2830 |
| 1272988 | 458439 | 458458 | AACTTCATCAATATTTCCCC | 2831 |
| 1272989 | 458397 | 458416 | TGTGGGCCTCTATTAAGATC | 2832 |
| 1272990 | 458399 | 458418 | CATGTGGGCCTCTATTAAGA | 2833 |
| 1272991 | 458401 | 458420 | TGCATGTGGGCCTCTATTAA | 2834 |
| 1272992 | 458453 | 458472 | TTTATACTTTACCCAACTTC | 2835 |
| 1272993 | 458454 | 458473 | CTTTATACTTTACCCAACTT | 2836 |
| 1272994 | 458455 | 458474 | GCTTTATACTTTACCCAACT | 2837 |
| 1272995 | 458440 | 458459 | CAACTTCATCAATATTTCCC | 2838 |
| 1272996 | 458457 | 458476 | TGGCTTTATACTTTACCCAA | 2839 |
| 1272997 | 458458 | 458477 | TTGGCTTTATACTTTACCCA | 2840 |
| 1272998 | 458459 | 458478 | TTTGGCTTTATACTTTACCC | 2841 |
| 1272999 | 458569 | 458588 | CTTTAGTATGTCGAGAACTC | 2842 |
| 1273000 | 458441 | 458460 | CCAACTTCATCAATATTTCC | 2843 |
| 1273001 | 461466 | 461485 | ACTCATCATGATCTTGGTAA | 2844 |
| 1273002 | 463053 | 463072 | TCACTGAGTTTTTGTAGTTC | 2845 |
| 1273003 | 463191 | 463210 | TCTGGAATCTTGTAGAGGAT | 2846 |
| 1273004 | 463192 | 463211 | TTCTGGAATCTTGTAGAGGA | 2847 |
| 1273005 | 467047 | 467066 | TTCATCAGTTAGTCAGGTTA | 2848 |
| 1273006 | 464395 | 464414 | ATTCAGCACTTAGGTAGTTC | 2849 |
| 1273007 | 464399 | 464418 | TCCCATTCAGCACTTAGGTA | 2850 |
| 1273008 | 464400 | 464419 | TTCCCATTCAGCACTTAGGT | 2851 |
| 1273061 | 468982 | 469001 | CCATTTTGACCTTCTTAGCC | 2872 |
| 1273062 | 468983 | 469002 | ACCATTTTGACCTTCTTAGC | 2873 |
| 1273063 | 465232 | 465251 | TCTCGGGTATATAAATTAAT | 2874 |
| 1273064 | 465233 | 465252 | ATCTCGGGTATATAAATTAA | 2875 |
| 1273065 | 468992 | 469011 | AACTGCTTCACCATTTTGAC | 2876 |
| 1273066 | 468993 | 469012 | TAACTGCTTCACCATTTTGA | 2877 |
| 1273067 | 468994 | 469013 | TTAACTGCTTCACCATTTTG | 2878 |
| 1273068 | 464522 | 464541 | TTAGGTTAGTGCACAGATAA | 2879 |
| 1273069 | 464523 | 464542 | GTTAGGTTAGTGCACAGATA | 2880 |
| 1273070 | 464534 | 464553 | GTCTCTGCTCAGTTAGGTTA | 2881 |
| 1273071 | 479991 | 480010 | CTATCTGTACAAAATGGAAC | 2882 |
| 1273072 | 479992 | 480011 | GCTATCTGTACAAAATGGAA | 2883 |
| 1273073 | 479993 | 480012 | AGCTATCTGTACAAAATGGA | 2884 |
| 1273084 | 457732 | 457751 | AGGTGTCTTATATCTATGAT | 2885 |
| 1273085 | 457742 | 457761 | GAAACCAGCCAGGTGTCTTA | 2886 |
| 1273086 | 474391 | 474410 | TCAACCAATTTGCTATTCAT | 2887 |
| 1273087 | 474392 | 474411 | GTCAACCAATTTGCTATTCA | 2888 |
| 1273088 | 457733 | 457752 | CAGGTGTCTTATATCTATGA | 2889 |
| 1273089 | 474394 | 474413 | AGGTCAACCAATTTGCTATT | 2853 |
| 1273090 | 474395 | 474414 | TAGGTCAACCAATTTGCTAT | 2861 |
| 1273091 | 474396 | 474415 | TTAGGTCAACCAATTTGCTA | 2854 |
| 1273092 | 474397 | 474416 | TTTAGGTCAACCAATTTGCT | 2890 |
| 1273093 | 474398 | 474417 | GTTTAGGTCAACCAATTTGC | 2891 |
| 1273094 | 474399 | 474418 | GGTTTAGGTCAACCAATTTG | 2892 |
| 1273095 | 478527 | 478546 | GTATCAGGCAACAGAATCTC | 2893 |
| 1273096 | 478528 | 478547 | TGTATCAGGCAACAGAATCT | 2894 |
| 1273097 | 478529 | 478548 | ATGTATCAGGCAACAGAATC | 2895 |
| 1273098 | 457734 | 457753 | CCAGGTGTCTTATATCTATG | 2896 |
| 1273099 | 478535 | 478554 | AACGCAATGTATCAGGCAAC | 2856 |
| 1273101 | 478537 | 478556 | AAAACGCAATGTATCAGGCA | 2897 |
| 1273102 | 478538 | 478557 | TAAAACGCAATGTATCAGGC | 2898 |
| 1273103 | 457735 | 457754 | GCCAGGTGTCTTATATCTAT | 2852 |
| 1273104 | 478727 | 478746 | CACATTACCCATCCGTTCTT | 2899 |
| 1273105 | 478728 | 478747 | TCACATTACCCATCCGTTCT | 2900 |
| 1273106 | 478729 | 478748 | ATCACATTACCCATCCGTTC | 2901 |
| 1273107 | 478730 | 478749 | GATCACATTACCCATCCGTT | 2858 |
| 1273108 | 478731 | 478750 | TGATCACATTACCCATCCGT | 2859 |
| 1273109 | 478732 | 478751 | CTGATCACATTACCCATCCG | 2860 |
| 1273110 | 478734 | 478753 | TGCTGATCACATTACCCATC | 2862 |
| 1273111 | 478735 | 478754 | TTGCTGATCACATTACCCAT | 2863 |
| 1273112 | 457736 | 457755 | AGCCAGGTGTCTTATATCTA | 2855 |
| 1273113 | 478737 | 478756 | TCTTGCTGATCACATTACCC | 2902 |
| 1273114 | 478738 | 478757 | TTCTTGCTGATCACATTACC | 2903 |
| 1273115 | 457737 | 457756 | CAGCCAGGTGTCTTATATCT | 2904 |

[0474] The compounds in Table 64 are 6-10-4 MOE gapmers. The gapmers are 20 nucleosides in length, wherein the central gap segment consists of ten 2′-β-D-deoxynucleosides, the 5′ wing segment consists of six 2′-MOE nucleosides, and the 3′ wing segment consists of four 2′-MOE nucleosides. The sugar motif of the gapmers is (from 5′ to 3′): eeeeeeddddddddddeeee; wherein ‘d’ represents a 2′-β-D-deoxyriboxyl sugar moiety, and ‘e’ represents a 2′-MOE sugar moiety. The gapmers have an internucleoside linkage motif of (from 5′ to 3′): sooooossssssssssoss, wherein “s” represents a phosphorothioate internucleoside linkage and “o” represents a phosphodiester internucleoside linkage. All cytosine residues are 5-methylcytosines.

TABLE 64
6-10-4 MOE gapmers with a mixed
PO/PS internucleoside linkages
complementary to human UBE3A-ATS

| | SEQ | SEQ | | |
|---|---|---|---|---|
| | ID | ID | | |
| | NO: 1 | NO: 1 | | SEQ |
| Compound | Start | Stop | | ID |
| ID | Site | Site | SEQUENCE | NO |
| 1263457 | 479995 | 480014 | TGAGCTATCTGTACAAAATG | 2743 |
| 1263458 | 479996 | 480015 | GTGAGCTATCTGTACAAAAT | 2744 |
| 1263459 | 479997 | 480016 | CGTGAGCTATCTGTACAAAA | 1142 |
| 1263504 | 460996 | 461015 | TTTTTCCATTTTTCTCTTAG | 2745 |
| 1263505 | 460997 | 461016 | GTTTTTCCATTTTTCTCTTA | 2746 |
| 1263506 | 460999 | 461018 | GTGTTTTTCCATTTTTCTCT | 598 |
| 1263507 | 461000 | 461019 | TGTGTTTTTCCATTTTTCTC | 2747 |
| 1263508 | 461001 | 461020 | GTGTGTTTTTCCATTTTTCT | 2748 |
| 1263509 | 461002 | 461021 | TGTGTGTTTTTCCATTTTTC | 2749 |
| 1263510 | 465235 | 465254 | TCATCTCGGGTATATAAATT | 2750 |
| 1263511 | 465236 | 465255 | GTCATCTCGGGTATATAAAT | 1132 |
| 1263512 | 465237 | 465256 | GGTCATCTCGGGTATATAAA | 1207 |
| 1263513 | 465238 | 465257 | TGGTCATCTCGGGTATATAA | 318 |
| 1263514 | 465239 | 465258 | TTGGTCATCTCGGGTATATA | 2473 |
| 1263515 | 465240 | 465259 | ATTGGTCATCTCGGGTATAT | 1655 |
| 1263516 | 465241 | 465260 | TATTGGTCATCTCGGGTATA | 2548 |
| 1263517 | 468985 | 469004 | TCACCATTTTGACCTTCTTA | 2751 |
| 1263518 | 468986 | 469005 | TTCACCATTTTGACCTTCTT | 2752 |
| 1263519 | 468987 | 469006 | CTTCACCATTTTGACCTTCT | 2753 |
| 1263520 | 468988 | 469007 | GCTTCACCATTTTGACCTTC | 377 |
| 1263521 | 468989 | 469008 | TGCTTCACCATTTTGACCTT | 2754 |
| 1263522 | 468990 | 469009 | CTGCTTCACCATTTTGACCT | 2755 |
| 1263523 | 468991 | 469010 | ACTGCTTCACCATTTTGACC | 2756 |
| 1263524 | 464525 | 464544 | CAGTTAGGTTAGTGCACAGA | 2728 |
| 1263525 | 464526 | 464545 | TCAGTTAGGTTAGTGCACAG | 2757 |
| 1263526 | 464527 | 464546 | CTCAGTTAGGTTAGTGCACA | 2758 |
| 1263527 | 464528 | 464547 | GCTCAGTTAGGTTAGTGCAC | 1504 |
| 1263528 | 464529 | 464548 | TGCTCAGTTAGGTTAGTGCA | 2759 |
| 1263529 | 464530 | 464549 | CTGCTCAGTTAGGTTAGTGC | 2729 |
| 1263530 | 464531 | 464550 | TCTGCTCAGTTAGGTTAGTG | 2760 |
| 1263531 | 479994 | 480013 | GAGCTATCTGTACAAAATGG | 2761 |
| 1263533 | 483970 | 483989 | GCATACCCAGGGTAGGATTC | 765 |
| 1263535 | 483971 | 483990 | TGCATACCCAGGGTAGGATT | 1445 |
| 1263537 | 483972 | 483991 | GTGCATACCCAGGGTAGGAT | 766 |
| 1263540 | 483973 | 483992 | TGTGCATACCCAGGGTAGGA | 2762 |
| 1263542 | 483974 | 483993 | ATGTGCATACCCAGGGTAGG | 2595 |
| 1273023 | 457735 | 457754 | GCCAGGTGTCTTATATCTAT | 2852 |
| 1273024 | 457736 | 457755 | AGCCAGGTGTCTTATATCTA | 2855 |
| 1273025 | 474393 | 474412 | GGTCAACCAATTTGCTATTC | 1809 |
| 1273026 | 474394 | 474413 | AGGTCAACCAATTTGCTATT | 2853 |
| 1273027 | 474395 | 474414 | TAGGTCAACCAATTTGCTAT | 2861 |
| 1273028 | 474396 | 474415 | TTAGGTCAACCAATTTGCTA | 2854 |
| 1273029 | 478535 | 478554 | AACGCAATGTATCAGGCAAC | 2856 |
| 1273030 | 478536 | 478555 | AAACGCAATGTATCAGGCAA | 2857 |
| 1273031 | 478730 | 478749 | GATCACATTACCCATCCGTT | 2858 |
| 1273032 | 478731 | 478750 | TGATCACATTACCCATCCGT | 2859 |
| 1273033 | 478732 | 478751 | CTGATCACATTACCCATCCG | 2860 |
| 1273034 | 478733 | 478752 | GCTGATCACATTACCCATCC | 1291 |
| 1273035 | 478734 | 478753 | TGCTGATCACATTACCCATC | 2862 |
| 1273036 | 478735 | 478754 | TTGCTGATCACATTACCCAT | 2863 |

[0475] The compounds in Table 65 are 4-8-6 MOE gapmers. The gapmers are 18 nucleosides in length, wherein the central gap segment consists of eight 2′-β-D-deoxynucleosides, the 5′ segment consists of four 2′-MOE nucleosides, and the 3′ wing segment consists of six 2′-MOE nucleosides. The sugar motif of the gapmers is (from 5′ to 3′): eeeeddddddddeeeeee; wherein ‘d’ represents a 2′-β-D-deoxyriboxyl sugar moiety, and ‘e’ represents a 2′-MOE sugar moiety. The gapmers have an internucleoside linkage motif of (from 5′ to 3′): soosssssssssoooss; wherein “s” represents a phosphorothioate internucleoside linkage and “o” represents a phosphodiester internucleoside linkage. All cytosine residues are 5-methylcytosines.

TABLE 65
4-8-6 MOE gapmers with a mixed PO/PS
internucleoside linkages complementary
to human UBE3A-ATS

| | SEQ | SEQ | | |
|---|---|---|---|---|
| | ID | ID | | |
| | NO: 1 | NO: 1 | | SEQ |
| Compound | Start | Stop | | ID |
| ID | Site | Site | SEQUENCE | NO |
| 1263403 | 465237 | 465254 | TCATCTCGGGTATATAAA | 2768 |
| 1263404 | 465238 | 465255 | GTCATCTCGGGTATATAA | 2769 |
| 1263405 | 465239 | 465256 | GGTCATCTCGGGTATATA | 2770 |
| 1263406 | 465240 | 465257 | TGGTCATCTCGGGTATAT | 2771 |
| 1263407 | 465241 | 465258 | TTGGTCATCTCGGGTATA | 2772 |
| 1263408 | 468987 | 469004 | TCACCATTTTGACCTTCT | 2773 |
| 1263409 | 468988 | 469005 | TTCACCATTTTGACCTTC | 2774 |
| 1263410 | 468989 | 469006 | CTTCACCATTTTGACCTT | 2775 |
| 1263411 | 468991 | 469008 | TGCTTCACCATTTTGACC | 2776 |
| 1263412 | 464527 | 464544 | CAGTTAGGTTAGTGCACA | 2777 |
| 1263413 | 464528 | 464545 | TCAGTTAGGTTAGTGCAC | 2778 |
| 1263414 | 464529 | 464546 | CTCAGTTAGGTTAGTGCA | 2779 |
| 1263415 | 464530 | 464547 | GCTCAGTTAGGTTAGTGC | 2780 |
| 1263416 | 464531 | 464548 | TGCTCAGTTAGGTTAGTG | 2781 |
| 1263417 | 479996 | 480013 | GAGCTATCTGTACAAAAT | 2782 |
| 1263418 | 479997 | 480014 | TGAGCTATCTGTACAAAA | 2783 |
| 1263419 | 479998 | 480015 | GTGAGCTATCTGTACAAA | 2784 |
| 1263420 | 479999 | 480016 | CGTGAGCTATCTGTACAA | 2785 |
| 1263543 | 483971 | 483988 | CATACCCAGGGTAGGATT | 2763 |
| 1263546 | 483972 | 483989 | GCATACCCAGGGTAGGAT | 2764 |
| 1263549 | 483973 | 483990 | TGCATACCCAGGGTAGGA | 2765 |
| 1263552 | 483974 | 483991 | GTGCATACCCAGGGTAGG | 2766 |
| 1263557 | 483975 | 483992 | TGTGCATACCCAGGGTAG | 2767 |
| 1273037 | 457737 | 457754 | GCCAGGTGTCTTATATCT | 2864 |
| 1273038 | 478535 | 478552 | CGCAATGTATCAGGCAAC | 2865 |
| 1273039 | 478536 | 478553 | ACGCAATGTATCAGGCAA | 2866 |
| 1273040 | 478732 | 478749 | GATCACATTACCCATCCG | 2867 |
| 1273041 | 478733 | 478750 | TGATCACATTACCCATCC | 2868 |
| 1273042 | 478735 | 478752 | GCTGATCACATTACCCAT | 2869 |
| 1273043 | 457738 | 457755 | AGCCAGGTGTCTTATATC | 2870 |
| 1273060 | 474393 | 474410 | TCAACCAATTTGCTATTC | 2871 |

[0476] The compounds in Table 66 are 5-8-5 MOE gapmers. The gapmers are 18 nucleosides in length, wherein the central gap segment consists of eight 2′-β-D-deoxynucleosides and the 5′ and 3′ wing segments each consists of five 2′-MOE nucleosides. The sugar motif of the gapmers is (from 5′ to 3′): eeeeeddddddddeeeee; wherein ‘d’ represents a 2′-β-D-deoxyriboxyl sugar moiety, and ‘e’ represents a 2′-MOE sugar moiety. The gapmers have an internucleoside linkage motif of (from 5′ to 3′): sooosssssssssooss; wherein “s” represents a phosphorothioate internucleoside linkage and “o” represents a phosphodiester internucleoside linkage. All cytosine residues are 5-methylcytosines.

TABLE 66
5-8-5 MOE gapmers with a mixed PO/PS
internucleoside linkages
complementary to human UBE3A-ATS

| | SEQ | SEQ | | |
|---|---|---|---|---|
| | ID | ID | | |
| | NO: 1 | NO: 1 | | SEQ |
| Compound | Start | Stop | | ID |
| ID | Site | Site | SEQUENCE | NO |
| 1263421 | 465237 | 465254 | TCATCTCGGGTATATAAA | 2768 |
| 1263422 | 465238 | 465255 | GTCATCTCGGGTATATAA | 2769 |
| 1263423 | 465239 | 465256 | GGTCATCTCGGGTATATA | 2770 |
| 1263424 | 465240 | 465257 | TGGTCATCTCGGGTATAT | 2771 |
| 1263425 | 465241 | 465258 | TTGGTCATCTCGGGTATA | 2772 |
| 1263426 | 468987 | 469004 | TCACCATTTTGACCTTCT | 2773 |
| 1263427 | 464527 | 464544 | CAGTTAGGTTAGTGCACA | 2777 |
| 1263428 | 464528 | 464545 | TCAGTTAGGTTAGTGCAC | 2778 |
| 1263429 | 464529 | 464546 | CTCAGTTAGGTTAGTGCA | 2779 |
| 1263430 | 464530 | 464547 | GCTCAGTTAGGTTAGTGC | 2780 |
| 1263431 | 464531 | 464548 | TGCTCAGTTAGGTTAGTG | 2781 |
| 1263432 | 479996 | 480013 | GAGCTATCTGTACAAAAT | 2782 |
| 1263433 | 479997 | 480014 | TGAGCTATCTGTACAAAA | 2783 |
| 1263434 | 479998 | 480015 | GTGAGCTATCTGTACAAA | 2784 |
| 1263435 | 479999 | 480016 | CGTGAGCTATCTGTACAA | 2785 |
| 1263544 | 483971 | 483988 | CATACCCAGGGTAGGATT | 2763 |
| 1263547 | 483972 | 483989 | GCATACCCAGGGTAGGAT | 2764 |
| 1263550 | 483973 | 483990 | TGCATACCCAGGGTAGGA | 2765 |
| 1263553 | 483974 | 483991 | GTGCATACCCAGGGTAGG | 2766 |
| 1263554 | 483975 | 483992 | TGTGCATACCCAGGGTAG | 2767 |
| 1273052 | 457737 | 457754 | GCCAGGTGTCTTATATCT | 2864 |
| 1273053 | 457738 | 457755 | AGCCAGGTGTCTTATATC | 2870 |
| 1273054 | 474393 | 474410 | TCAACCAATTTGCTATTC | 2871 |
| 1273055 | 478535 | 478552 | CGCAATGTATCAGGCAAC | 2865 |
| 1273056 | 478536 | 478553 | ACGCAATGTATCAGGCAA | 2866 |
| 1273057 | 478732 | 478749 | GATCACATTACCCATCCG | 2867 |
| 1273058 | 478733 | 478750 | TGATCACATTACCCATCC | 2868 |
| 1273059 | 478735 | 478752 | GCTGATCACATTACCCAT | 2869 |

[0477] The compounds in Table 67 are 6-8-4 MOE gapmers. The gapmers are 18 nucleosides in length, wherein the central gap segment consists of eight 2′-β-D-deoxynucleosides, the 5′ wing segment consists of six 2′-MOE nucleosides, and the 3′ wing segment consists of four 2′-MOE nucleosides. The sugar motif of the gapmers is (from 5′ to 3′): eeeeeeddddddddeeee; wherein ‘d’ represents a 2′-β-D-deoxyriboxyl sugar moiety, and ‘e’ represents a 2′-MOE sugar moiety. The gapmers have an internucleoside linkage motif of (from 5′ to 3′): soooosssssssssoss; wherein “s” represents a phosphorothioate internucleoside linkage and “o” represents a phosphodiester internucleoside linkage. All cytosine residues are 5-methylcytosines.

TABLE 67
6-8-4 MOE gapmers with a mixed PO/PS
internucleoside linkages complementary
to human UBE3A-ATS

| | SEQ | SEQ | | |
|---|---|---|---|---|
| | ID | ID | | |
| | NO: 1 | NO: 1 | | SEQ |
| Compound | Start | Stop | | ID |
| ID | Site | Site | SEQUENCE | NO |
| 1263436 | 465237 | 465254 | TCATCTCGGGTATATAAA | 2768 |
| 1263437 | 465238 | 465255 | GTCATCTCGGGTATATAA | 2769 |
| 1263438 | 465239 | 465256 | GGTCATCTCGGGTATATA | 2770 |
| 1263439 | 465240 | 465257 | TGGTCATCTCGGGTATAT | 2771 |
| 1263440 | 465241 | 465258 | TTGGTCATCTCGGGTATA | 2772 |
| 1263441 | 468987 | 469004 | TCACCATTTTGACCTTCT | 2773 |
| 1263442 | 464527 | 464544 | CAGTTAGGTTAGTGCACA | 2777 |
| 1263443 | 464528 | 464545 | TCAGTTAGGTTAGTGCAC | 2778 |
| 1263444 | 464529 | 464546 | CTCAGTTAGGTTAGTGCA | 2779 |
| 1263445 | 464530 | 464547 | GCTCAGTTAGGTTAGTGC | 2780 |
| 1263446 | 464531 | 464548 | TGCTCAGTTAGGTTAGTG | 2781 |
| 1263447 | 479996 | 480013 | GAGCTATCTGTACAAAAT | 2782 |
| 1263448 | 479997 | 480014 | TGAGCTATCTGTACAAAA | 2783 |
| 1263449 | 479998 | 480015 | GTGAGCTATCTGTACAAA | 2784 |
| 1263450 | 479999 | 480016 | CGTGAGCTATCTGTACAA | 2785 |
| 1263545 | 483971 | 483988 | CATACCCAGGGTAGGATT | 2763 |
| 1263548 | 483972 | 483989 | GCATACCCAGGGTAGGAT | 2764 |
| 1263551 | 483973 | 483990 | TGCATACCCAGGGTAGGA | 2765 |
| 1263555 | 483974 | 483991 | GTGCATACCCAGGGTAGG | 2766 |
| 1263556 | 483975 | 483992 | TGTGCATACCCAGGGTAG | 2767 |
| 1273044 | 457737 | 457754 | GCCAGGTGTCTTATATCT | 2864 |
| 1273045 | 457738 | 457755 | AGCCAGGTGTCTTATATC | 2870 |
| 1273046 | 474393 | 474410 | TCAACCAATTTGCTATTC | 2871 |
| 1273047 | 478535 | 478552 | CGCAATGTATCAGGCAAC | 2865 |
| 1273048 | 478536 | 478553 | ACGCAATGTATCAGGCAA | 2866 |
| 1273049 | 478732 | 478749 | GATCACATTACCCATCCG | 2867 |
| 1273050 | 478733 | 478750 | TGATCACATTACCCATCC | 2868 |
| 1273051 | 478735 | 478752 | GCTGATCACATTACCCAT | 2869 |

### Example 8: Effect of Modified Oligonucleotides on Human UBE3A-ATS RNA In Vitro, Multiple Doses

[0478] Modified oligonucleotides selected from the examples above were tested at various doses in human IPS derived iCell GABANeurons (Cellular Dynamics), as described in Example 4. Reduction of UBE3A-ATS RNA is presented in the tables below as percent UBE3A-ATS RNA amount relative to untreated control (UTC) cells. Where possible, the half maximal inhibitory concentration (IC₅₀) of each modified oligonucleotide was calculated using a linear regression on a log/linear plot of the data in excel. In some cases, an IC₅₀ could not be reliably calculated and the data point is marked as “NC.”. Values marked with “N.D.” indicate that a value was not determined in this experiment.

TABLE 68
Dose-dependent percent reduction of human
UBE3A-ATS RNA in vitro (40,000 cells/well)

| | UBE3A-ATS expression (% UTC) | | | | | |
|---|---|---|---|---|---|---|
| Compound | 250 | 740.7 | 2,222 | 6,666 | 20,000 | IC₅₀ |
| Number | nM | nM | nM | nM | nM | (μM) |
| 750519 | 69 | 53 | 23 | N.D. | N.D. | 0.7 |
| 617557 | 66 | 54 | 34 | 25 | N.D. | 0.9 |
| 749860 | 62 | 48 | 39 | 20 | 13 | 0.7 |
| 1065593 | 44 | 32 | 21 | 11 | 9 | N.C. |
| 1263517 | 55 | 47 | 35 | 17 | 18 | 0.4 |
| 1263519 | 52 | 39 | 25 | 17 | 16 | 0.2 |
| 1263533 | 51 | 34 | 29 | 28 | 23 | 0.1 |
| 1263540 | 39 | 29 | 29 | 29 | 24 | N.C. |
| 1272994 | 51 | 39 | 28 | 14 | 10 | 0.2 |
| 1272996 | 62 | 45 | 38 | 20 | 13 | 0.6 |
| 1272997 | 73 | 53 | 39 | 24 | 18 | 1.1 |
| 1272998 | 67 | 53 | 30 | 19 | 13 | 0.8 |
| 1273030 | 68 | 54 | 33 | 30 | 22 | 1.0 |
| 1273033 | 51 | 50 | 31 | 32 | 20 | 0.4 |
| 1273049 | 57 | 41 | 32 | 24 | 21 | 0.3 |

TABLE 69
Dose-dependent percent reduction of human
UBE3A-ATS RNA in vitro (40,000 cells/well)

| | UBE3A-ATS expression (% UTC) | | | | | |
|---|---|---|---|---|---|---|
| Compound | 250 | 740.7 | 2,222 | 6,666 | 20,000 | IC₅₀ |
| Number | nM | nM | nM | nM | nM | (μM) |
| 750519 | 79 | 66 | 29 | 15 | N.D. | 1.1 |
| 1263426 | 64 | 48 | 34 | 29 | 25 | 0.7 |
| 1273042 | 92 | 72 | 58 | 43 | 40 | 5.5 |
| 1273051 | 70 | 47 | 34 | 29 | 22 | 0.9 |
| 1273055 | 71 | 58 | 47 | 40 | 27 | 1.9 |
| 1273057 | 73 | 71 | 50 | 37 | 39 | 3.4 |
| 1273058 | 80 | 69 | 58 | 48 | 34 | 4.8 |
| 1273087 | 55 | 34 | 26 | 14 | 20 | 0.2 |
| 1273107 | 63 | 59 | 36 | 26 | 26 | 1.0 |
| 1273113 | 75 | 68 | 58 | 47 | 28 | 3.6 |

TABLE 70
Dose-dependent percent reduction of human
UBE3A-ATS RNA in vitro (40,000 cells/well)

| | UBE3A-ATS expression (% UTC) | | | | | |
|---|---|---|---|---|---|---|
| Compound | 250 | 740.7 | 2,222 | 6,666 | 20,000 | IC₅₀ |
| Number | nM | nM | nM | nM | nM | (μM) |
| 750519 | 56 | 38 | 22 | 10 | 25 | 0.2 |
| 749860 | 68 | 47 | 37 | 19 | 16 | 0.8 |
| 1065645 | 66 | 45 | 31 | 19 | 12 | 0.6 |
| 1263461 | 70 | 66 | 55 | 32 | 27 | 2.3 |
| 1263486 | 74 | 48 | 44 | 25 | 21 | 1.2 |

TABLE 71
Dose-dependent percent reduction of human
UBE3A-ATS RNA in vitro (40,000 cells/well)

| | UBE3A-ATS expression (% UTC) | | | | | |
|---|---|---|---|---|---|---|
| Compound | 250 | 740.7 | 2,222 | 6,666 | 20,000 | IC₅₀ |
| Number | nM | nM | nM | nM | nM | (μM) |
| 750519 | 63 | 39 | 19 | 9 | 4 | 0.4 |
| 1263517 | 56 | 40 | 27 | 17 | 11 | 0.3 |
| 1263518 | 72 | 65 | 42 | 28 | 20 | 1.6 |
| 1263532 | 57 | 44 | 38 | 33 | 64 | 0.5 |
| 1263533 | 41 | 56 | 37 | ND | 26 | NC |

TABLE 72
Dose-dependent percent reduction of human
UBE3A-ATS RNA in vitro (40,000 cells/well)

| | UBE3A-ATS expression (% UTC) | | | | | |
|---|---|---|---|---|---|---|
| Compound | 250 | 740.7 | 2,222 | 6,666 | 20,000 | IC₅₀ |
| Number | nM | nM | nM | nM | nM | (μM) |
| 617557 | 59 | 56 | 37 | 23 | 23 | 0.8 |
| 1263537 | 70 | 86 | 82 | 77 | 59 | N.C. |
| 1272944 | 51 | 39 | 23 | 13 | 8 | 0.2 |
| 1273033 | 55 | 40 | 32 | 21 | 15 | 0.3 |
| 1273039 | 68 | 58 | 37 | 28 | 20 | 1.1 |

TABLE 73
Dose-dependent percent reduction of human
UBE3A-ATS RNA in vitro (40,000 cells/well)

| | UBE3A-ATS expression (% UTC) | | | | | |
|---|---|---|---|---|---|---|
| Compound | 250 | 740.7 | 2,222 | 6,666 | 20,000 | IC₅₀ |
| Number | nM | nM | nM | nM | nM | (μM) |
| 617557 | 70 | 57 | 38 | N.D. | N.D. | 1.0 |
| 1273050 | 81 | 75 | 76 | 62 | 41 | 16.5 |
| 1273055 | 59 | 48 | 40 | 26 | 18 | 0.6 |
| 1273062 | 54 | 37 | 28 | 18 | 13 | 0.2 |
| 1273090 | 76 | 64 | 71 | 56 | 55 | N.C. |
| 1273091 | 75 | 79 | 56 | 44 | 32 | 4.3 |

### Example 9: Effect of Modified Oligonucleotides on Human UBE3A-ATS RNA and UBE3A RNA In Vitro, Multiple Doses

[0479] Modified oligonucleotides selected from the examples above were tested at various doses in 10-week differentiated human neuronal cells derived from Angelman Syndrome patient derived IPS cells as described in Example 6 above. Reduction of UBE3A-ATS RNA or induction of UBE3A RNA is presented in the tables below as percent UBE3A-ATS RNA amount or percent UBE3A RNA relative to untreated control (UTC) cells. Values marked with “N.D.” indicate that a value was not determined in this experiment.

[0480] Several modified oligonucleotides were found to reduce UBE3A-ATS RNA accompanied by concurrent increase in UBE3A RNA in Angelman's patient IPS cell derived neurons.

TABLE 74
Reduction of UBE3A-ATS RNA and increase of UBE3A
RNA in Angelman Syndrome IPS cell derived neurons

| | UBE3A-ATS RNA | | | | | UBE3A RNA | | | | |
|---|---|---|---|---|---|---|---|---|---|---|
| | (% UTC) (RTS4796) | | | | | (% UTC) (RTS35984) | | | | |
| Compound | 250 | 741 | 2222 | 6667 | 20000 | 250 | 741 | 2222 | 6667 | 20000 |
| ID | nM | nM | nM | nM | nM | nM | nM | nM | nM | nM |
| 750519 | 51 | 20 | 11 | 7 | 5 | 297 | 224 | 235 | 250 | 205 |
| 749860 | 47 | 21 | 18 | 15 | 8 | 148 | 119 | 245 | 307 | 324 |
| 1065645 | 41 | 15 | 13 | 11 | 13 | 213 | 185 | 298 | 315 | 353 |
| 1263461 | 49 | 42 | 34 | 25 | 16 | 141 | 185 | 248 | 235 | 221 |
| 1263486 | 64 | 47 | 33 | 29 | 16 | 136 | 174 | 215 | 323 | 264 |

TABLE 75
Reduction of UBE3A-ATS RNA and increase of UBE3A
RNA in Angelman Syndrome IPS cell derived neurons

| | UBE3A-ATS RNA | | | | | UBE3A RNA | | | | |
|---|---|---|---|---|---|---|---|---|---|---|
| | (% UTC) (RTS4796) | | | | | (% UTC) (RTS35984) | | | | |
| Compound | 250 | 741 | 2222 | 6667 | 20000 | 250 | 741 | 2222 | 6667 | 20000 |
| ID | nM | nM | nM | nM | nM | nM | nM | nM | nM | nM |
| 750519 | 46 | 22 | 13 | 7 | 7 | 259 | 274 | 520 | 482 | 272 |
| 1263517 | 37 | 29 | 16 | 12 | 12 | 230 | 261 | 462 | 521 | 283 |
| 1263518 | 66 | 39 | 29 | 21 | 18 | 187 | 183 | 269 | 496 | 277 |
| 1263532 | 39 | 26 | 21 | 17 | 24 | 192 | 162 | 393 | 390 | 357 |
| 1263533 | 34 | 25 | 24 | 18 | 29 | 296 | 367 | 389 | 371 | 548 |

TABLE 76
Reduction of UBE3A-ATS RNA and increase of UBE3A
RNA in Angelman Syndrome IPS cell derived neurons

| | UBE3A-ATS RNA | | | | | UBE3A RNA | | | | |
|---|---|---|---|---|---|---|---|---|---|---|
| | (% UTC) (RTS4796) | | | | | (% UTC) (RTS35984) | | | | |
| Compound | 250 | 741 | 2222 | 6667 | 20000 | 250 | 741 | 2222 | 6667 | 20000 |
| ID | nM | nM | nM | nM | nM | nM | nM | nM | nM | nM |
| 617557 | 68 | 44 | 28 | 24 | 20 | 120 | 210 | 319 | 453 | 396 |
| 1263537 | 29 | 26 | 21 | 26 | 16 | 139 | 203 | 414 | 440 | 480 |
| 1272944 | 35 | 25 | 13 | 11 | 7 | 148 | 235 | 469 | 702 | 677 |
| 1273033 | 38 | 21 | 21 | 16 | 18 | 119 | 244 | 487 | 422 | 514 |
| 1273039 | 64 | 41 | 29 | 20 | 17 | 183 | 237 | 395 | 376 | 418 |

TABLE 77
Reduction of UBE3A-ATS RNA and increase of UBE3A
RNA in Angelman Syndrome IPS cell derived neurons

| | UBE3A-ATS RNA | | | | | UBE3A RNA | | | | |
|---|---|---|---|---|---|---|---|---|---|---|
| | (% UTC) (RTS4796) | | | | | (% UTC) (RTS35984) | | | | |
| Compound | 250 | 741 | 2222 | 6667 | 20000 | 250 | 741 | 2222 | 6667 | 20000 |
| ID | nM | nM | nM | nM | nM | nM | nM | nM | nM | nM |
| 617557 | 63 | 50 | 33 | 28 | 27 | 126 | 230 | 347 | 335 | 368 |
| 1273050 | 64 | 48 | 59 | 41 | 28 | 165 | 152 | 240 | 457 | 483 |
| 1273055 | 44 | 31 | 38 | 22 | 17 | 541 | 664 | 1014 | 1094 | 887 |
| 1273062 | 34 | 54 | 51 | 47 | 27 | 253 | 296 | 421 | 705 | 997 |
| 1273090 | 70 | 54 | 30 | 39 | 23 | 155 | 165 | 259 | 487 | 692 |
| 1273091 | 91 | 86 | 54 | 37 | 31 | 96 | 121 | 135 | 156 | 284 |

### Example 10: Tolerability of Modified Oligonucleotides Complementary to Human UBE3A-ATS in Wild-Type Mice. 3 Hour Study

[0481] Modified oligonucleotides described above were tested in wild-type female C57/B16 mice to assess the tolerability of the oligonucleotides. Wild-type female C57/B16 mice each received a single ICV dose of 700 μg of modified oligonucleotide listed in the table below. Each treatment group consisted of 4 mice. A group of 4 mice received PBS as a negative control for each experiment (identified in separate tables below). At 3 hours post-injection, mice were evaluated according to seven different criteria. The criteria are (1) the mouse was bright, alert, and responsive; (2) the mouse was standing or hunched without stimuli; (3) the mouse showed any movement without stimuli; (4) the mouse demonstrated forward movement after it was lifted; (5) the mouse demonstrated any movement after it was lifted; (6) the mouse responded to tail pinching; (7) regular breathing. For each of the 7 criteria, a mouse was given a subscore of 0 if it met the criteria and 1 if it did not (the functional observational battery score or FOB). After all 7 criteria were evaluated, the scores were summed for each mouse and averaged within each treatment group. The results are presented in the tables below.

TABLE 78
Tolerability scores in mice at 700 μg dose

| Compound Number | 3 hr FOB |
|---|---|
| PBS | 0.0 |
| 749860 | 0.0 |
| 749865 | 4.0 |
| 749984 | 4.8 |
| 750006 | 3.5 |
| 750009 | 3.8 |
| 750540 | 3.5 |
| 750544 | 2.8 |
| 750567 | 5.0 |

TABLE 79
Tolerability scores in mice at 700 μg dose

| Compound Number | 3 hr FOB |
|---|---|
| PBS | 0 |
| 1065272 | 5.0 |
| 1065295 | 2.0 |
| 1065296 | 5.5 |
| 1065324 | 2.8 |
| 1065330 | 6.8 |
| 1065369 | 6.8 |
| 1065438 | 5.8 |
| 1065465 | 5.0 |
| 1065513 | 5.8 |
| 1065576 | 7.0 |
| 1065578 | 3.2 |
| 1065579 | 3.8 |
| 1065582 | 4.2 |
| 1065586 | 3.0 |
| 1065590 | 6.0 |
| 1065591 | 4.0 |
| 1065593 | 1.0 |
| 1065595 | 4.8 |
| 1065597 | 4.5 |
| 1065599 | 6.0 |
| 1065600 | 4.2 |
| 1065605 | 3.8 |
| 1065607 | 5.2 |
| 1065608 | 3.0 |

TABLE 80
Tolerability scores in mice at 700 μg dose

| Compound Number | 3 hr FOB |
|---|---|
| PBS | 0.0 |
| 1065609 | 0.0 |
| 1065613 | 0.0 |
| 1065616 | 5.5 |
| 1065619 | 5.0 |
| 1065621 | 2.0 |
| 1065623 | 3.5 |
| 1065624 | 3.5 |
| 1065631 | 1.0 |
| 1065635 | 1.0 |
| 1065641 | 1.5 |
| 1065642 | 4.0 |
| 1065644 | 6.8 |
| 1065645 | 3.0 |
| 1065646 | 2.0 |
| 1065651 | 4.0 |
| 1065654 | 7.0 |
| 1065667 | 4.0 |
| 1065669 | 1.0 |
| 1065671 | 4.0 |
| 1065672 | 6.8 |
| 1065674 | 4.0 |
| 1065676 | 2.0 |
| 1065678 | 5.0 |
| 1065680 | 1.0 |

TABLE 81
Tolerability scores in mice at 700 μg dose

| Compound Number | 3 hr FOB |
|---|---|
| PBS | 0 |
| 1065685 | 5.0 |
| 1065686 | 4.8 |
| 1065690 | 3.8 |
| 1065696 | 6.2 |
| 1065708 | 5.5 |
| 1065709 | 4.2 |
| 1065710 | 2.8 |
| 1065712 | 6.8 |
| 1065713 | 5.0 |
| 1065719 | 4.0 |
| 1065728 | 1.0 |
| 1065735 | 3.5 |
| 1065750 | 6.2 |
| 1065754 | 3.2 |
| 1065765 | 4.2 |
| 1065766 | 5.2 |
| 1065768 | 5.5 |
| 1065785 | 3.8 |
| 1065795 | 1.0 |
| 1065799 | 1.0 |
| 1065810 | 2.2 |
| 1065812 | 3.8 |
| 1065813 | 5.0 |
| 1065817 | 5.0 |

TABLE 82
Tolerability scores in mice at 700 μg dose

| Compound Number | 3 hr FOB |
|---|---|
| PBS | 0.0 |
| 1065821 | 6.5 |
| 1065823 | 4.0 |
| 1065826 | 3.0 |
| 1065829 | 4.8 |
| 1065840 | 4.5 |
| 1065856 | 6.2 |
| 1065857 | 6.0 |
| 1065858 | 4.0 |
| 1065859 | 0.0 |
| 1065863 | 4.8 |
| 1065868 | 3.2 |
| 1065889 | 1.0 |
| 1065894 | 3.8 |
| 1065899 | 4.5 |
| 1065901 | 4.0 |
| 1065902 | 4.0 |
| 1065903 | 5.5 |
| 1065914 | 5.0 |
| 1065920 | 2.0 |
| 1065932 | 4.5 |
| 1065937 | 1.0 |
| 1065947 | 1.2 |
| 1065953 | 6.5 |
| 1065954 | 5.5 |

TABLE 83
Tolerability scores in mice at 700 μg dose

| Compound Number | 3 hr FOB |
|---|---|
| PBS | 0.0 |
| 1065955 | 5.0 |
| 1065977 | 6.2 |
| 1066009 | 2.0 |
| 1066037 | 4.2 |
| 1066046 | 1.0 |
| 1066072 | 4.0 |
| 1066076 | 5.0 |
| 1066089 | 1.0 |
| 1066092 | 1.0 |
| 1066097 | 1.2 |
| 1066119 | 11.0 |
| 1066217 | 6.0 |
| 1066221 | 3.8 |
| 1066249 | 4.5 |
| 1066253 | 6.0 |
| 1066311 | 2.0 |
| 1066350 | 4.0 |
| 1066375 | 1.0 |
| 1066377 | 6.2 |
| 1066378 | 5.2 |
| 1066396 | 6.0 |
| 1066420 | 4.0 |
| 1066423 | 2.8 |
| 1066429 | 5.8 |

TABLE 84
Tolerability scores in mice at 700 μg dose

| Compound Number | 3 hr FOB |
|---|---|
| PBS | 0.0 |
| 749931 | 0.0 |
| 749933 | 4.0 |
| 749937 | 0.5 |
| 749944 | 3.8 |
| 749956 | 1.8 |
| 749964 | 2.0 |
| 749969 | 5.2 |
| 749991 | 2.2 |
| 750028 | 4.2 |
| 750030 | 3.2 |
| 750032 | 2.2 |
| 750040 | 4.2 |
| 750051 | 2.5 |
| 750092 | 0.8 |
| 750100 | 2.5 |
| 750131 | 0.5 |
| 750139 | 3.0 |
| 750140 | 1.2 |
| 750196 | 4.0 |
| 750210 | 3.5 |
| 750214 | 3.25 |
| 750228 | 0.0 |
| 750270 | 1.0 |
| 750292 | 0.0 |
| 750312 | 4.8 |
| 750325 | 1.0 |
| 750326 | 0.0 |
| 750329 | 5.5 |
| 750344 | 6.2 |
| 750350 | 2.8 |
| 750359 | 0.0 |
| 750360 | 3.2 |
| 750365 | 5.2 |
| 750366 | 0.0 |
| 750386 | 0.0 |
| 750413 | 0.0 |
| 750416 | 7.0 |
| 750418 | 1.8 |
| 750430 | 6.2 |
| 750431 | 5.0 |
| 750439 | 5.5 |
| 750452 | 2.5 |
| 750517 | 3.0 |
| 750519 | 1.0 |
| 750542 | 3.5 |
| 750549 | 0.0 |

TABLE 85
Tolerability scores in mice at 700 μg dose

| Compound Number | 3 hr FOB |
|---|---|
| PBS | 0.0 |
| 617456 | 4.8 |
| 617459 | 7.0 |
| 617470 | 6.5 |
| 617473 | 6.8 |
| 617536 | 6.5 |
| 617547 | 6.8 |
| 617557 | 5.2 |
| 617593 | 6.5 |
| 749794 | 5.0 |
| 749796 | 4.5 |
| 749816 | 5.8 |
| 749861 | 3.0 |
| 749863 | 5.5 |
| 749869 | 3.8 |
| 749882 | 6.8 |
| 749885 | 0.5 |
| 749893 | 1.2 |
| 749894 | 0.0 |
| 749907 | 5.0 |
| 749921 | 6.0 |

TABLE 86
Tolerability scores in mice at 700 μg dose

| Compound Number | 3 hr FOB |
|---|---|
| PBS | 0.0 |
| 1065473 | 3.2 |
| 1065561 | 6.0 |
| 1065592 | 4.0 |
| 1065625 | 7.0 |
| 1065791 | 1.0 |
| 1065924 | 1.0 |
| 1066003 | 4.0 |

TABLE 87
Tolerability scores in mice at 700 μg dose

| Compound ID | 3 hr FOB |
|---|---|
| PBS | 0.0 |
| 1263471 | 6.2 |
| 1263472 | 3.2 |
| 1263473 | 1.0 |
| 1263474 | 0.0 |
| 1263475 | 0.0 |
| 1263476 | 1.0 |
| 1263477 | 0.0 |
| 1263478 | 1.0 |
| 1263479 | 4.0 |
| 1263480 | 4.0 |
| 1263481 | 5.5 |
| 1263482 | 4.0 |
| 1263483 | 4.0 |
| 1263484 | 4.0 |
| 1263485 | 4.0 |
| 1263486 | 2.0 |
| 1263487 | 1.0 |
| 1263488 | 1.0 |
| 1263489 | 0.0 |
| 1263490 | 0.0 |
| 1263491 | 0.0 |
| 1263492 | 1.0 |
| 1263494 | 4.0 |
| 1263495 | 4.0 |
| 1263496 | 4.0 |
| 1263497 | 4.0 |
| 1263498 | 4.0 |
| 1263499 | 4.0 |
| 1263500 | 4.7 |
| 1263501 | 5.5 |
| 1263502 | 4.0 |
| 1263503 | 4.0 |
| 1263504 | 1.0 |
| 1263505 | 0.0 |
| 1263506 | 0.0 |
| 1263507 | 0.0 |
| 1263508 | 0.0 |
| 1263509 | 0.0 |
| 1263510 | 2.0 |

TABLE 88
Tolerability scores in mice at 700 μg dose

| Compound ID | 3 hr FOB |
|---|---|
| PBS | 0.0 |
| 1165878 | 4.0 |
| 1263511 | 4.0 |
| 1263512 | 6.0 |
| 1263513 | 6.0 |
| 1263514 | 6.5 |
| 1263515 | 4.0 |
| 1263516 | 4.0 |
| 1263517 | 1.0 |
| 1263518 | 0.0 |
| 1263519 | 1.0 |
| 1263520 | 1.0 |
| 1263521 | 0.0 |
| 1263522 | 0.0 |
| 1263523 | 1.0 |
| 1263524 | 5.2 |
| 1263525 | 4.8 |
| 1263526 | 4.0 |
| 1263527 | 4.0 |
| 1263528 | 4.0 |
| 1263529 | 3.0 |
| 1263530 | 4.0 |
| 1263531 | 5.2 |
| 1263532 | 1.0 |
| 1263533 | 1.0 |
| 1263534 | 1.0 |
| 1263535 | 4.0 |
| 1263536 | 2.0 |
| 1263537 | 1.0 |
| 1263538 | 3.0 |
| 1263539 | 1.0 |
| 1263540 | 0.0 |

TABLE 89
Tolerability scores in mice at 700 μg dose

| Compound ID | 3 hr FOB |
|---|---|
| PBS | 0.0 |
| 1263541 | 1.8 |
| 1263542 | 3.5 |
| 1263543 | 1.0 |
| 1263544 | 1.0 |
| 1263545 | 2.0 |
| 1263546 | 0.0 |
| 1263547 | 1.0 |
| 1263548 | 1.0 |
| 1263549 | 0.0 |
| 1263550 | 1.0 |
| 1263551 | 2.0 |
| 1263552 | 1.0 |
| 1263553 | 5.5 |
| 1263554 | 1.0 |
| 1263555 | 4.0 |
| 1263556 | 1.0 |
| 1263557 | 1.0 |

TABLE 90
Tolerability scores in mice at 700 μg dose

| Compound ID | 3 hr FOB |
|---|---|
| PBS | 0.0 |
| 1263403 | 5.3 |
| 1263404 | 4.3 |
| 1263405 | 6.3 |
| 1263406 | 4.7 |
| 1263407 | 2.3 |
| 1263408 | 0.3 |
| 1263409 | 0.0 |
| 1263410 | 0.0 |
| 1263411 | 0.0 |
| 1263412 | 2.0 |
| 1263413 | 2.3 |
| 1263414 | 5.3 |
| 1263415 | 4.0 |
| 1263416 | 7.0 |
| 1263417 | 3.3 |
| 1263418 | 3.0 |
| 1263419 | 1.7 |
| 1263420 | 1.0 |
| 1263421 | 3.0 |
| 1263422 | 4.3 |
| 1263423 | 6.0 |
| 1263424 | 6.3 |
| 1263425 | 5.0 |

TABLE 91
Tolerability scores in mice at 700 μg dose

| Compound ID | 3 hr FOB |
|---|---|
| PBS | 0.0 |
| 749952 | 6.0 |
| 749953 | 3.3 |
| 1165583 | 5.7 |
| 1165584 | 3.3 |
| 1263426 | 2.0 |
| 1263427 | 4.0 |
| 1263428 | 4.3 |
| 1263429 | 1.3 |
| 1263430 | 2.3 |
| 1263431 | 6.3 |
| 1263432 | 6.0 |
| 1263433 | 4.7 |
| 1263434 | 1.0 |
| 1263435 | 1.3 |
| 1263436 | 2.3 |
| 1263437 | 4.7 |
| 1263438 | 6.0 |
| 1263439 | 4.7 |
| 1263440 | 6.7 |
| 1263441 | 0.3 |
| 1263442 | 3.7 |
| 1263443 | 3.0 |
| 1263444 | 6.3 |
| 1263445 | 5.0 |
| 1263446 | 5.7 |
| 1263447 | 4.7 |
| 1263448 | 5.0 |
| 1263449 | 4.7 |
| 1263450 | 2.0 |
| 1263451 | 1.3 |
| 1263452 | 0 |
| 1263453 | 0 |

TABLE 92
Tolerability scores in mice at 700 μg dose

| Compound ID | 3 hr FOB |
|---|---|
| PBS | 0 |
| 1065786 | 2.0 |
| 1165526 | 0.7 |
| 1165577 | 3.7 |
| 1263454 | 0.0 |
| 1263455 | 0.0 |
| 1263456 | 3.3 |
| 1263457 | 5.3 |
| 1263458 | 1.3 |
| 1263459 | 1.0 |
| 1263460 | 1.0 |
| 1263461 | 1.0 |
| 1263462 | 1.0 |
| 1263463 | 1.0 |
| 1263464 | 1.3 |
| 1263465 | 1.7 |
| 1263466 | 5.0 |
| 1263467 | 6.0 |
| 1263468 | 4.3 |
| 1263469 | 7.0 |
| 1263470 | 6.7 |
| 1272943 | 2.0 |
| 1272944 | 2.3 |
| 1272945 | 2.7 |
| 1272946 | 0.0 |
| 1272947 | 0.0 |
| 1272948 | 3.3 |
| 1272949 | 4.0 |
| 1272950 | 3.7 |
| 1272951 | 0.7 |
| 1272952 | 2.0 |
| 1272953 | 0.3 |
| 1272954 | 1.0 |

TABLE 93
Tolerability scores in mice at 700 μg dose

| Compound ID | 3 hr FOB |
|---|---|
| PBS | 0.0 |
| 1272955 | 3.7 |
| 1272956 | 5.3 |
| 1272957 | 4.0 |
| 1272958 | 5.0 |
| 1272959 | 3.3 |
| 1272960 | 1.0 |
| 1272961 | 4.7 |
| 1272962 | 2.0 |
| 1272963 | 4.0 |
| 1272964 | 2.3 |
| 1272965 | 1.0 |
| 1272966 | 2.3 |
| 1272967 | 1.0 |
| 1272968 | 1.0 |
| 1272969 | 0.0 |
| 1272970 | 0.0 |
| 1272971 | 0.0 |
| 1272972 | 0.0 |
| 1272973 | 4.0 |
| 1272974 | 1.0 |
| 1272975 | 1.0 |
| 1272976 | 2.0 |
| 1272977 | 1.0 |
| 1272978 | 2.3 |
| 1272979 | 1.0 |

TABLE 94
Tolerability scores in mice at 700 μg dose

| Compound ID | 3 hr FOB |
|---|---|
| PBS | 0.0 |
| 1272980 | 3.3 |
| 1272981 | 3.3 |
| 1272982 | 1.0 |
| 1272983 | 1.0 |
| 1272984 | 4.0 |
| 1272985 | 1.0 |
| 1272986 | 4.7 |
| 1272987 | 1.0 |
| 1272988 | 1.0 |
| 1272989 | 1.0 |
| 1272990 | 4.0 |
| 1272991 | 4.0 |
| 1272992 | 0.0 |
| 1272993 | 0.0 |
| 1272994 | 1.0 |
| 1272995 | 1.0 |
| 1272996 | 0.7 |
| 1272997 | 1.0 |
| 1272998 | 0.0 |
| 1272999 | 5.0 |
| 1273000 | 0.0 |
| 1273001 | 3.0 |
| 1273002 | 3.7 |
| 1273003 | 2.7 |
| 1273004 | 3.0 |
| 1273005 | 4.0 |
| 1273006 | 3.3 |
| 1273007 | 3.0 |
| 1273008 | 3.3 |
| 1273009 | 1.0 |
| 1273010 | 4.7 |
| 1273011 | 1.0 |

TABLE 95
Tolerability scores in mice at 700 μg dose

| Compound ID | 3 hr FOB |
|---|---|
| PBS | 0.0 |
| 699781 | 0.0 |
| 1065707 | 2.0 |
| 1065711 | 4.0 |
| 1065921 | 5.7 |
| 1165585 | 3.7 |
| 1165621 | 1.0 |
| 1273012 | 0.0 |
| 1273013 | 4.0 |
| 1273014 | 2.0 |
| 1273015 | 2.0 |
| 1273016 | 0.0 |
| 1273017 | 1.0 |
| 1273018 | 0.0 |
| 1273019 | 0.0 |
| 1273020 | 0.0 |
| 1273021 | 0.0 |
| 1273022 | 0.0 |
| 1273023 | 0.0 |
| 1273024 | 0.0 |
| 1273025 | 5.0 |
| 1273026 | 5.3 |
| 1273027 | 5.0 |
| 1273028 | 0.0 |
| 1273029 | 4.7 |
| 1273030 | 3.0 |
| 1273031 | 0.0 |
| 1273032 | 0.0 |
| 1273033 | 0.0 |

TABLE 96
Tolerability scores in mice at 700 μg dose

| Compound ID | 3 hr FOB |
|---|---|
| PBS | 0.0 |
| 1273034 | 0.0 |
| 1273035 | 1.0 |
| 1273036 | 1.0 |
| 1273037 | 1.0 |
| 1273038 | 1.0 |
| 1273039 | 1.0 |
| 1273040 | 0.0 |
| 1273041 | 0.0 |
| 1273042 | 0.0 |
| 1273043 | 6.0 |
| 1273044 | 0.0 |
| 1273045 | 0.0 |
| 1273046 | 3.0 |
| 1273047 | 3.0 |
| 1273048 | 0.0 |
| 1273049 | 0.0 |
| 1273050 | 0.0 |
| 1273051 | 0.0 |
| 1273052 | 0.0 |
| 1273053 | 6.0 |
| 1273054 | 3.0 |
| 1273055 | 2.0 |
| 1273056 | 2.3 |
| 1273057 | 2.0 |
| 1273058 | 1.0 |
| 1273059 | 1.0 |
| 1273060 | 0.7 |
| 1273061 | 1.0 |
| 1273062 | 0.0 |
| 1273063 | 0.0 |
| 1273064 | 0.0 |
| 1273065 | 0.0 |
| 1273066 | 0.0 |
| 1273067 | 1.0 |
| 1273068 | 6.0 |
| 1273069 | 6.0 |
| 1273070 | 1.0 |
| 1273071 | 0.0 |
| 1273072 | 0.0 |
| 1273073 | 4.0 |
| 1273084 | 0.0 |
| 1273085 | 3.0 |
| 1273086 | 2.0 |
| 1273087 | 1.0 |
| 1273088 | 0.0 |
| 1273089 | 5.3 |
| 1273090 | 0.0 |
| 1273091 | 0.0 |
| 1273092 | 0.0 |
| 1273093 | 1.0 |
| 1273094 | 6.0 |
| 1273095 | 4.3 |
| 1273096 | 4.7 |
| 1273097 | 5.0 |
| 1273098 | 1.0 |
| 1273099 | 1.0 |
| 1273101 | 0.7 |
| 1273102 | 1.0 |
| 1273103 | 0.0 |
| 1273104 | 0.0 |
| 1273105 | 0.0 |
| 1273106 | 0.0 |
| 1273107 | 0.0 |
| 1273108 | 0.0 |
| 1273109 | 1.0 |
| 1273110 | 0.0 |
| 1273111 | 0.0 |
| 1273112 | 2.3 |
| 1273113 | 0.0 |
| 1273114 | 0.0 |
| 1273115 | 2.3 |

TABLE 97
Tolerability scores in mice at 700 μg dose

| Compound ID | 3 hr FOB |
|---|---|
| PBS | 0.0 |
| 1165523 | 2.0 |
| 1165533 | 2.3 |
| 1165538 | 3.0 |
| 1165550 | 1.3 |
| 1165563 | 1.3 |
| 1165586 | 2.3 |
| 1165596 | 2.3 |
| 1165608 | 4.0 |
| 1165616 | 3.0 |
| 1165694 | 3.3 |
| 1165737 | 3.7 |
| 1165827 | 3.3 |
| 1165855 | 3.0 |
| 1165897 | 0.3 |
| 1179808 | 2.3 |
| 1179839 | 6.7 |
| 1179841 | 2.0 |
| 1179843 | 2.0 |
| 1273100 | 7.0 |

TABLE 98
Tolerability scores in mice at 700 μg dose

| Compound Number | 3 hr FOB |
|---|---|
| PBS | 0.0 |
| 1165521 | 3.3 |
| 1165524 | 4.7 |
| 1165536 | 4.0 |
| 1165545 | 6.0 |
| 1165552 | 5.7 |
| 1165553 | 6.0 |
| 1165554 | 7.0 |
| 1165555 | 6.0 |
| 1165562 | 5.7 |
| 1165588 | 4.7 |
| 1165590 | 5.7 |
| 1165611 | 6.0 |

### Example 11: Tolerability of Modified Oligonucleotides Complementary to Human UBE3A-ATS in Rats, 3 Hour Study

[0482] Modified oligonucleotides described above were tested in rats to assess the tolerability of the oligonucleotides. Sprague Dawley rats each received a single intrathecal (IT) dose of 3 mg of oligonucleotide listed in the table below. Each treatment group consisted of 4 rats. A group of four rats received PBS as a negative control. At 3 hours post-injection, movement in 7 different parts of the body were evaluated for each rat. The 7 body parts are (1) the rat's tail; (2) the rat's posterior posture; (3) the rat's hind limbs; (4) the rat's hind paws; (5) the rat's forepaws; (6) the rat's anterior posture; (7) the rat's head. For each of the 7 different body parts, each rat was given a sub-score of 0 if the body part was moving or 1 if the body part was paralyzed (the functional observational battery score or FOB). After each of the 7 body parts were evaluated, the sub-scores were summed for each rat and then averaged for each group. For example, if a rat's tail, head, and all other evaluated body parts were moving 3 hours after the 3 mg IT dose, it would get a summed score of 0. If another rat was not moving its tail 3 hours after the 3 mg IT dose but all other evaluated body parts were moving, it would receive a score of 1. Results are presented as the average score for each treatment group.

TABLE 99
Tolerability scores in rats at 3 mg dose

| Compound No. | FOB 3 hr |
|---|---|
| PBS | 0.0 |
| 749860 | 0.0 |
| 749861 | 4.0 |
| 749869 | 4.8 |
| 749885 | 0.8 |
| 749893 | 0.5 |
| 749931 | 0.5 |
| 750006 | 4.5 |

TABLE 100
Tolerability scores in rats at 3 mg dose

| Compound No. | FOB 3 hr |
|---|---|
| PBS | 0.0 |
| 750030 | 4.0 |
| 750051 | 4.0 |
| 750092 | 2.5 |
| 750100 | 4.0 |
| 750139 | 5.3 |
| 750140 | 3.5 |
| 750270 | 3.0 |
| 750292 | 0.0 |
| 750325 | 1.8 |
| 750386 | 0.8 |

TABLE 101
Tolerability scores in rats at 3 mg dose

| Compound No. | FOB 3 hr |
|---|---|
| PBS | 0.0 |
| 1065578 | 4.0 |
| 1065586 | 3.0 |
| 1065609 | 2.0 |
| 1065613 | 3.8 |
| 1065635 | 1.8 |
| 1065641 | 3.3 |
| 1065645 | 3.0 |
| 1065646 | 2.5 |

TABLE 102
Tolerability scores in rats at 3 mg dose

| Compound | FOB |
|---|---|
| No. | 3 hr |
| PBS | 0.0 |
| 750413 | 0.3 |
| 1065669 | 2.8 |
| 1065680 | 4.0 |
| 1065710 | 5.5 |
| 1065754 | 5.3 |
| 1065785 | 6.0 |
| 1065795 | 3.3 |
| 1065799 | 2.0 |
| 1065812 | 4.0 |
| 1065826 | 2.0 |

TABLE 103
Tolerability scores in rats at 3 mg dose

| Compound | FOB |
|---|---|
| No. | 3 hr |
| PBS | 0.0 |
| 1065920 | 3.5 |
| 1065937 | 3.8 |
| 1066092 | 3.3 |
| 1066221 | 4.0 |
| 1066350 | 2.3 |

TABLE 104
Tolerability scores in rats at 3 mg dose

| Compound | FOB |
|---|---|
| No. | 3 hr |
| PBS | 0.3 |
| 1263408 | 2.0 |
| 1263409 | 2.5 |
| 1263410 | 2.5 |
| 1263411 | 1.3 |
| 1263412 | 3.0 |
| 1263419 | 1.8 |
| 1263420 | 1.8 |
| 1263429 | 2.5 |
| 1263434 | 2.0 |

TABLE 105
Tolerability scores in rats at 3 mg dose

| Compound | FOB |
|---|---|
| No. | 3 hr |
| PBS | 0.3 |
| 1263435 | 3.0 |
| 1263441 | 2.3* |
| 1263450 | 2.0 |
| 1263451 | 4.0 |
| 1263452 | 2.0 |
| 1263453 | 1.8 |
| 1263454 | 1.5 |
| 1263455 | 3.3 |
| 1263458 | 0.3 |

*One of the four rats in this group died during surgery, and so is excluded from this value.

TABLE 106
Tolerability scores in rats at 3 mg dose

| Compound | FOB |
|---|---|
| No. | 3 hr |
| PBS | 0.5 |
| 1263476 | 0.3 |
| 1263478 | 1.0 |
| 1263488 | 3.0 |
| 1263489 | 2.3 |
| 1263507 | 2.0 |
| 1263517 | 1.3 |
| 1263518 | 1.8 |
| 1263519 | 1.0 |
| 1263521 | 2.0 |
| 1263533 | 1.3 |

TABLE 107
Tolerability scores in rats at 3 mg dose

| Compound | FOB |
|---|---|
| No. | 3 hr |
| PBS | 0.0 |
| 1165563 | 3.0 |
| 1179841 | 3.0 |
| 1179843 | 3.3 |
| 1263407 | 3.8 |
| 1263413 | 4.0 |
| 1263430 | 4.3 |
| 1263436 | 2.8 |
| 1263540 | 2.5 |
| 1272944 | 2.0 |
| 1272994 | 1.0 |
| 1272996 | 1.0 |

TABLE 108
Tolerability scores in rats at 3 mg dose

| Compound | FOB |
|---|---|
| No. | 3 hr |
| PBS | 0.0 |
| 1272998 | 0.3 |
| 1273034 | 0.0 |
| 1273035 | 0.8 |
| 1273036 | 0.0 |
| 1273049 | 0.3 |
| 1273051 | 0.0. |
| 1273055 | 2.0 |
| 1273056 | 3.7 |
| 1273057 | 1.0 |
| 1273058 | 0.8 |
| 1273062 | 2.5 |
| 1273065 | 2.3 |
| 1273087 | 2.0 |
| 1273099 | 2.5 |
| 1273102 | 4.5 |
| 1273106 | 2.0 |
| 1273107 | 2.0 |
| 1273108 | 2.0 |
| 1273113 | 1.0 |
| 1273115 | 3.3 |
| 1165523 | 5.0 |
| 1165550 | 3.0 |

TABLE 109
Tolerability scores in rats at 3 mg dose

| Compound | FOB |
|---|---|
| No. | 3 hr |
| PBS | 0.0 |
| 1263426 | 2.3 |
| 1263462 | 2.8 |
| 1272974 | 3.8 |
| 1272997 | 0.8 |
| 1273020 | 0.5 |
| 1273033 | 1.8 |
| 1273038 | 3.0 |
| 1273039 | 3.3 |
| 1273042 | 2.0 |
| 1273048 | 3.0 |
| 1273104 | 3.0 |
| 1273105 | 3.0 |
| 1273109 | 3.8 |
| 1273110 | 1.0 |
| 1273111 | 2.7 |
| 1065593 | 1.5 |
| 1263547 | 4.0 |
| 1165586 | 0.0 |
| 1263537 | 1.5 |

TABLE 110
Tolerability scores in rats at 3 mg dose

| Compound | FOB |
|---|---|
| No. | 3 hr |
| PBS | 0.0 |
| 749953 | 4.5 |
| 1065711 | 3.5 |
| 1263417 | 6.3 |
| 1263418 | 3.3 |
| 1263421 | 5.8 |
| 1263443 | 5.0 |
| 1263456 | 5.0 |
| 1263529 | 2.5 |
| 1263538 | 4.7 |
| 1273030 | 0.0 |
| 1273047 | 4.0 |
| 1273085 | 4.0 |

TABLE 111
Tolerability scores in rats at 3 mg dose

| Compound | FOB |
|---|---|
| No. | 3 hr |
| PBS | 0.0 |
| 749991 | 1.3 |
| 1263460 | 3.0 |
| 1263461 | 2.0 |
| 1263486 | 3.0 |
| 1263532 | 1.5 |
| 1263551 | 4.0 |
| 1273050 | 1.0 |
| 1273090 | 1.0 |
| 1273091 | 2.0 |
| 1273101 | 3.5 |
| 1263522 | 1.7 |

### Example 12: Tolerability of Modified Oligonucleotides Complementary to Human UBE3A-ATS in Wild-Type Mice, Two Week Study

[0483] Modified oligonucleotides described above were tested in wild-type female C57/B16 mice to assess the tolerability of the oligonucleotides. Wild-type female C57/B16 mice each received a single ICV dose of 700 μg of modified oligonucleotide listed in the table below. Each treatment group consisted of 4 mice. A group of 4 mice received PBS as a negative control for each experiment (identified in separate tables below). At 2 weeks post-injection, mice were evaluated according to seven different criteria. The criteria are (1) the mouse was bright, alert, and responsive; (2) the mouse was standing or hunched without stimuli; (3) the mouse showed any movement without stimuli; (4) the mouse demonstrated forward movement after it was lifted; (5) the mouse demonstrated any movement after it was lifted; (6) the mouse responded to tail pinching; (7) regular breathing. For each of the 7 criteria, a mouse was given a subscore of 0 if it met the criteria and 1 if it did not (the functional observational battery score or FOB). After all 7 criteria were evaluated, the scores were summed for each mouse and averaged within each treatment group. The results are presented in the table below.

TABLE 112
Tolerability scores in mice at 700 μg dose

| Compound | 2-week |
|---|---|
| Number | FOB |
| PBS | 0.0 |
| 1065645 | 0.0 |
| 1263517 | 0.0 |
| 1263518 | 0.0 |
| 1263533 | 0.0 |
| 1273039 | 0.0 |
| 1273062 | 0.0 |

### Example 13: Activity of Modified Oligonucleotides Complementary to Human UBE3A-ATS in Transgenic Mice

[0484] Modified oligonucleotides described above were tested in a UBE3A-ATS BAC transgenic mouse model.

[0485] The transgenic mouse model was developed at the University of Michigan Bacterial Artificial Chromosome Recombineering Core and contains region 25163935-25348867 from human chromosome 15 (GRCh38/hg38 assembly) (from BAC clone RP11-664B13). UBE3A-ATS expression is driven by the ENO2 promoter and terminated with the BGH poly(A) signal. The gene fragment was introduced into fertilized eggs from C57BL/6 mice by pronuclear injection to produce line RP 11-748 that is used in the experiments described below.

### Treatment

[0486] The UBE3A-ATS transgenic mice were divided into groups of 2-4 mice each. Each mouse received a single ICV bolus of 350 μg of modified oligonucleotide. A group of 4 mice received PBS as a negative control.

### RNA Analysis

[0487] After two weeks, mice were sacrificed and RNA was extracted from cortical brain tissue, hippocampal brain tissue, and spinal cord for real-time PCR analysis of measurement of RNA expression of UBE3A-ATS using primer probe set RTS4796 (described herein above) and/or primer probe set RTS40595 (forward sequence TCCTTCCCTACCTTAGTCTTGA, designated herein as SEQ ID NO: 14; reverse sequence CCCTCTTGAACCAGGAAACA, designated herein as SEQ ID NO: 15; probe sequence AGATGGCAGCCCACATTTCTACTGT, designated herein as SEQ ID NO: 16). Primer probe set RTS4796 is less reliable when the oligonucleotide binds at a site far from the primer probe binding site. Results are presented as percent change of RNA, relative to PBS control, normalized to mouse GAPDH. Mouse GAPDH was amplified using primer probe set RTS108 (forward sequence GGCAAATTCAACGGCACAGT, designated herein as SEQ ID NO: 11; reverse sequence GGGTCTCGCTCCTGGAAGAT, designated herein as SEQ ID NO: 12; probe sequence AAGGCCGAGAATGGGAAGCTTGTCATC, designated herein as SEQ ID NO: 13). In some cases, RTPCR value is not defined for a certain sample, and is labeled N.D. (Not Defined).

[0488] As shown in the table below, treatment with modified oligonucleotides resulted in reduction of UBE3A-ATS RNA in comparison to the PBS control.

TABLE 113
Reduction of human UBE3A-ATS RNA in transgenic mice

| | UBE3A-ATS RNA | | | UBE3A-ATS RNA | | |
|---|---|---|---|---|---|---|
| | (% control) RTS4796 | | | (% control) RTS40595 | | |
| Compound | SPINAL | | | SPINAL | | |
| ID | CORD | HIPPOCAMPUS | CORTEX | CORD | HIPPOCAMPUS | CORTEX |
| PBS | 100 | 100 | 100 | 100 | 100 | 100 |
| 749860 | 14 | N.D. | 26 | 12 | 24 | 23 |
| 749861 | 27 | N.D. | 51 | 26 | 48 | 49 |
| 749863 | 39 | N.D. | 57 | 36 | 45 | 54 |
| 749865 | 61 | N.D. | 92 | 66 | 97 | 85 |
| 749869 | 31 | 37 | 51 | 29 | 38 | 47 |
| 749882 | 31 | 28 | 35 | 30 | 30 | 32 |
| 749885 | 59 | 65 | 85 | 61 | 68 | 83 |
| 749893 | 28 | 35 | 44 | 27 | 35 | 40 |
| 749894 | 5 | 7 | 9 | 3 | 6 | 7 |
| 749907 | 53 | 48 | 70 | 51 | 47 | 63 |
| 749931 | 35 | 24 | 33 | 15 | 22 | 28 |
| 749969 | 17 | 14 | 14 | 11 | 13 | 10 |
| 749991 | 27 | 26 | 38 | 22 | 24 | 31 |
| 750006 | 24 | 21 | 24 | 19 | 19 | 18 |
| 750028 | 26 | 22 | 34 | 17 | 19 | 26 |
| 750030 | 40 | 30 | 44 | 32 | 26 | 34 |
| 750032 | 17 | 9 | 12 | 10 | 6 | 6 |
| 750040 | 55 | 42 | 65 | 50 | 44 | 59 |
| 750051 | 35 | 27 | 35 | 27 | 26 | 29 |
| 750092 | 55 | 43 | 63 | 47 | 40 | 53 |
| 750139 | 24 | 22 | 30 | 17 | 20 | 23 |
| 750140 | 22 | 16 | 22 | 15 | 13 | 15 |
| 750214 | 48 | 46 | 60 | 45 | 41 | 55 |
| 750292 | 27 | 35 | 40 | 21 | 31 | 34 |
| 750312 | 59 | 48 | 47 | 53 | 43 | 42 |
| 750359 | 30 | 23 | 25 | 25 | 19 | 20 |
| 750360 | 44 | 40 | 54 | 39 | 37 | 47 |
| 750365 | 58 | 69 | 88 | 56 | 65 | 82 |
| 750386 | 34 | 24 | 27 | 26 | 19 | 19 |
| 750413 | 45 | 37 | 38 | 36 | 34 | 30 |
| 750430 | 48 | 42 | 41 | 41 | 42 | 33 |
| 750439 | 53 | 46 | 52 | 34 | 44 | 46 |
| 1065296 | 34 | 34 | 39 | 31 | 34 | 34 |
| 1065578 | 35 | 42 | 49 | 34 | 42 | 42 |
| 1065579 | 19 | 18 | 19 | 17 | 18 | 14 |
| 1065586 | 45 | 55 | 74 | 43 | 55 | 68 |
| 1065590 | 43 | 53 | 67 | 42 | 51 | 63 |
| 1065591 | 21 | 24 | 29 | 19 | 21 | 25 |
| 1065595 | 25 | 34 | 49 | 13 | 30 | 41 |
| 1065599 | 19 | 22 | 27 | 18 | 22 | 24 |
| 1065600 | 31 | 35 | 42 | 32 | 35 | 39 |
| 1065605 | 44 | 64 | 67 | 44 | 62 | 63 |
| 1065607 | 28 | 36 | 39 | 29 | 33 | 34 |
| 1065608 | 18 | 42 | 53 | 18 | 38 | 49 |
| 1065623 | 16 | 28 | 34 | 15 | 29 | 30 |
| 1065635 | 32 | 39 | 41 | 30 | 38 | 36 |
| 1065641 | 32 | 55 | 50 | 30 | 49 | 44 |
| 1065642 | 43 | 58 | 65 | 42 | 52 | 59 |
| 1065645 | 18 | 30 | 24 | 15 | 24 | 18 |
| 1065646 | 39 | 60 | 50 | 39 | 54 | 45 |
| 1065651 | 29 | 47 | 38 | 28 | 43 | 34 |
| 1065667 | 23 | 30 | 26 | 19 | 24 | 22 |
| 1065671 | 21 | 29 | 30 | 18 | 25 | 26 |
| 1065685 | 71 | 76 | 82 | 40 | 68 | 71 |
| 1065690 | 12 | 16 | 20 | 9 | 12 | 15 |
| 1065708 | 28 | 38 | 33 | 24 | 31 | 27 |
| 1065710 | 29 | 34 | 32 | 27 | 29 | 26 |
| 1065713 | 31 | 34 | 40 | 29 | 29 | 34 |
| 1065765 | 25 | 27 | 33 | 21 | 22 | 28 |
| 1065813 | 38 | 49 | 67 | 34 | 41 | 62 |
| 1065823 | 37 | 33 | 36 | 30 | 24 | 28 |
| 1065858 | 23 | 25 | 21 | 15 | 14 | 13 |
| 1065859 | 29 | 20 | 22 | 19 | 11 | 13 |
| 1065863 | 52 | 45 | 39 | 39 | 34 | 29 |
| 1065868 | 22 | 19 | 19 | 14 | 13 | 12 |
| 1065920 | 47 | 60 | 56 | 45 | 51 | 44 |
| 1065932 | 28 | 33 | 35 | 23 | 25 | 26 |
| 1065947 | 34 | 35 | 40 | 28 | 25 | 30 |
| 1066221 | 44 | 74 | 76 | 43 | 69 | 69 |
| 1066420 | 55 | 74 | 71 | 52 | 71 | 61 |
| 1066423 | 43 | 42 | 39 | 37 | 35 | 32 |
| 1066429 | 75 | 74 | 83 | 70 | 65 | 72 |

TABLE 114
Reduction of human UBE3A-ATS RNA in transgenic mice

| | UBE3A-ATS RNA | | | UBE3A-ATS RNA | | |
|---|---|---|---|---|---|---|
| | (% control) RTS4796 | | | (% control) RTS40595 | | |
| Compound | SPINAL | | | SPINAL | | |
| ID | CORD | HIPPOCAMPUS | CORTEX | CORD | HIPPOCAMPUS | CORTEX |
| PBS | 100 | 100 | 100 | 100 | 100 | 100 |
| 1065272 | 40 | 29 | 39 | 37 | 31 | 39 |
| 1065582 | 45 | 28 | 52 | 43 | 31 | 51 |
| 1065616 | 38 | 25 | 45 | 36 | 25 | 42 |
| 1065619 | 33 | 23 | 54 | 31 | 27 | 55 |
| 1065621 | 42 | 33 | 57 | 43 | 41 | 54 |
| 1065624 | 20 | 40 | 62 | 20 | 42 | 61 |
| 1065631 | 24 | 32 | 71 | 24 | 34 | 65 |
| 1065669 | 38 | 33 | 89 | 34 | 30 | 72 |
| 1065674 | 37 | 36 | 111 | 35 | 34 | 101 |
| 1065678 | 33 | 36 | 105 | 32 | 35 | 96 |
| 1065680 | 43 | 61 | 134 | 40 | 59 | 121 |
| 1065686 | 21 | 25 | 63 | 19 | 22 | 55 |
| 1065696 | 44 | 36 | 117 | 40 | 32 | 108 |
| 1065719 | 63 | 36 | 122 | 56 | 32 | 109 |
| 1065728 | 20 | 11 | 53 | 14 | 9 | 42 |
| 1065754 | 47 | 25 | 112 | 41 | 24 | 105 |
| 1065766 | 29 | 41 | 110 | 24 | 41 | 98 |
| 1065768 | 40 | 41 | 99 | 32 | 38 | 84 |
| 1065799 | 44 | 43 | 104 | 38 | 40 | 99 |
| 1065812 | 19 | 15 | 35 | 12 | 12 | 26 |
| 1065817 | 29 | 23 | 60 | 22 | 20 | 52 |
| 1065821 | 23 | 19 | 42 | 16 | 17 | 34 |
| 1065829 | 36 | 19 | 80 | 27 | 18 | 58 |
| 1065840 | 27 | 15 | 61 | 21 | 14 | 45 |
| 1065856 | 22 | 19 | 44 | 14 | 13 | 30 |
| 1065857 | 35 | 28 | 58 | 26 | 21 | 38 |
| 1065899 | 37 | 30 | 77 | 30 | 24 | 58 |
| 1065902 | 21 | 17 | 55 | 17 | 14 | 41 |
| 1065937 | 22 | 12 | 91 | 17 | 11 | 65 |
| 1065953 | 19 | 13 | 58 | 13 | 10 | 41 |
| 1065955 | 34 | 19 | 69 | 26 | 16 | 53 |
| 1066046 | 58 | 35 | 122 | 50 | 32 | 106 |
| 1066076 | 46 | 27 | 76 | 41 | 25 | N.D. |
| 1066092 | 27 | 15 | 56 | 21 | 13 | 47 |
| 1066217 | 37 | 26 | 68 | 32 | 26 | 62 |
| 1066253 | 27 | 15 | 50 | 22 | 14 | 39 |
| 1066377 | 50 | 30 | 79 | 40 | 28 | 73 |

TABLE 115
Reduction of human UBE3A-ATS RNA in transgenic mice

| | UBE3A-ATS RNA (% control) | | |
|---|---|---|---|
| | RTS4796 | | |
| Compound | SPINAL | | |
| ID | CORD | HIPPOCAMPUS | CORTEX |
| PBS | 100 | 100 | 100 |
| 1263473 | 43 | 71 | 66 |
| 1263474 | 8 | 15 | 10 |
| 1263475 | 6 | 10 | 8 |
| 1263476 | 6 | 12 | 14 |
| 1263477 | 4 | 10 | 11 |
| 1263478 | 13 | 18 | 17 |
| 1263486 | 27 | 27 | 32 |
| 1263487 | 31 | 43 | 43 |
| 1263488 | 23 | 24 | 14 |
| 1263489 | 16 | 17 | 16 |
| 1263490 | 24 | 28 | 23 |
| 1263491 | 22 | 25 | 21 |
| 1263492 | 29 | 50 | 58 |
| 1263504 | 9 | 11 | 12 |
| 1263505 | 6 | 11 | 7 |
| 1263506 | 5 | 10 | 6 |
| 1263507 | 5 | 14 | 6 |
| 1263508 | 7 | 15 | 9 |
| 1263509 | 6 | 17 | 7 |
| 1263510 | 37 | 70 | 72 |
| 1263517 | 13 | 22 | 17 |
| 1263518 | 19 | 36 | 30 |
| 1263519 | 20 | 25 | 15 |
| 1263520 | 15 | 19 | 11 |
| 1263521 | 20 | 44 | 20 |
| 1263522 | 22 | 29 | 35 |
| 1263523 | 21 | 30 | 32 |
| 1263532 | 29 | 49 | 40 |
| 1263533 | 18 | 24 | 17 |
| 1263534 | 27 | 52 | 37 |
| 1263536 | 30 | 45 | 36 |
| 1263537 | 29 | 43 | 34 |
| 1263539 | 51 | 59 | 88 |
| 1263540 | 22* | 21* | 29* |
| 1263541 | 52 | 66 | 80 |
| 1263543 | 49 | 362 | 84 |
| 1263544 | 53 | 100 | 104 |
| 1263545 | 36 | 54 | 57 |
| 1263546 | 45 | 45 | 88 |
| 1263547 | 26 | 28 | 30 |
| 1263548 | 36 | 45 | 47 |
| 1263549 | 66 | 87 | 84 |
| 1263550 | 47 | 75 | 76 |
| 1263551 | 30 | 45 | 39 |
| 1263552 | 66 | 65 | 93 |
| 1263554 | 72 | 75 | 88 |
| 1263556 | 60 | 59 | 83 |
| 1263557 | 86 | 91 | 109 |
| 1263408 | 45 | 70 | 46 |
| 1263409 | 29 | 44 | 33 |
| 1263410 | 29 | 64 | 42 |
| 1263411 | 42 | 72 | 58 |
| 1263419 | 47 | 126 | 65 |
| 1263420 | 73 | 130 | 72 |
| 1263429 | 27 | 33 | 36 |
| 1263434 | 44 | 50 | 42 |
| 1263435 | 47 | 42 | 61 |
| 1263441 | 22 | 17 | 29 |
| 1263451 | 21 | 16 | 28 |
| 1263452 | 14 | 8 | 15 |
| 1263453 | 13 | 9 | 9 |

*Only 1 animal in group

TABLE 116
Reduction of human UBE3A-ATS RNA in transgenic mice

| | UBE3A-ATS RNA (% control) | | |
|---|---|---|---|
| Compound | SPINAL | | |
| ID | CORD | HIPPOCAMPUS | CORTEX |
| PBS | 100 | 100 | 100 |
| 1263454 | 6 | 8 | 13 |
| 1263455 | 5 | 19 | 35 |
| 1263458 | 39 | 62 | 88 |
| 1263459 | 28 | 45 | 52 |
| 1263460 | 11 | 28 | 34 |
| 1263461 | 24 | 30 | 35 |
| 1263462 | 25 | 24 | 25 |
| 1263463 | 36 | 40 | 66 |
| 1263464 | 25 | 22 | 38 |
| 1263465 | 32 | 35 | 39 |
| 1065786 | 121 | 75 | 32 |
| 1165526 | 116 | 78 | 46 |
| 1272943 | 41 | 73 | 32 |
| 1272946 | 37 | 69 | 33 |
| 1272947 | 55 | 94 | 54 |
| 1272951 | 70 | 89 | 75 |
| 1272952 | 125 | 85 | 109 |
| 1272953 | 86 | 78 | 51 |
| 1272954 | 110 | 89 | 70 |
| 1272955 | 137 | 136 | 70 |
| 1272960 | 59 | 77 | 40 |
| 1272962 | 45 | 52 | 26 |
| 1272964 | 74 | 58 | 62 |
| 1272965 | 43 | 39 | 25 |
| 1272966 | 52 | 68 | 67 |
| 1272967 | 65 | 69 | 62 |
| 1272968 | 76 | 62 | 66 |
| 1272969 | 83 | 60 | 147 |
| 1272970 | 143 | 57 | 60 |
| 1272971 | 81 | 58 | 48 |
| 1272972 | 74 | 69 | 38 |
| 1272974 | 40 | 29 | 18 |
| 1272975 | 124 | 86 | 96 |
| 1272976 | 93 | 62 | 50 |
| 1272977 | 58 | 59 | 47 |
| 1272978 | 39 | 46 | 40 |
| 1272979 | 61 | 69 | 46 |
| 1272982 | 60 | 58 | 42 |
| 1272983 | 84 | 83 | 70 |
| 1272985 | 72 | 56 | 38 |
| 1272987 | 181 | 37 | 28 |
| 1272988 | 66 | 34 | 31 |
| 1272989 | 87 | 60 | 68 |
| 1272992 | 77 | 45 | 42 |
| 1272993 | 57 | 36 | 60 |
| 1272994 | 16 | 12 | 10 |
| 1272995 | 182 | 35 | 93 |
| 1272996 | 26 | 9 | 18 |
| 1272997 | 24 | 12 | 27 |
| 1272998 | 26 | 14 | 17 |
| 1273000 | 104 | 45 | 56 |
| 1273003 | 93 | 28 | 60 |
| 1273009 | 39 | 8 | 19 |
| 1273011 | 145 | 78 | 80 |
| 1273012 | 110 | 36 | 71 |
| 1273014 | 46 | 19 | 37 |
| 1273015 | 79 | 35 | 68 |
| 1273016 | 58 | 34 | 37 |
| 1273017 | 46 | 39 | 56 |
| 1273018 | 41 | 24 | 60 |
| 1273019 | 98 | 39 | 80 |
| 1273020 | 44 | 10 | 19 |
| 1273021 | 59 | 27 | 47 |
| 1273022 | 73 | 23 | 45 |
| 1273023 | 54 | 23 | 31 |
| 1273024 | 29 | 21 | 25 |
| 1273028 | 46 | 50 | 28 |
| 1273031 | 45 | 17 | 28 |
| 1273032 | 40 | 21 | 35 |
| 1273033 | 36 | 12 | 26 |
| 699781 | 66 | 25 | 37 |
| 1065707 | 78 | 44 | 70 |
| 1165621 | 107 | 41 | 71 |

TABLE 117
Reduction of human UBE3A-ATS RNA in transgenic mice

UBE3A-ATS RNA (% control)

| Compound | SPINAL | |
|---|---|---|
| ID | CORD | HIPPOCAMPUS |
| PBS | 100 | 100 |
| 1273034 | 25 | 23 |
| 1273035 | 16 | 20 |
| 1273036 | 24 | 26 |
| 1273061 | 33 | 22 |
| 1273062 | 28 | 10 |
| 1273063 | 32 | 29 |
| 1273064 | 38 | 25 |
| 1273065 | 27 | 16 |
| 1273066 | 34 | 36 |
| 1273067 | 44 | 42 |
| 1273070 | 25 | 23 |
| 1273071 | 57 | 71 |
| 1273072 | 38 | 48 |
| 1273037 | 12 | 25 |
| 1273038 | 16 | 29 |
| 1273039 | 15 | 29 |
| 1273040 | 39 | 33 |
| 1273041 | 48 | 29 |
| 1273042 | 51 | 17 |
| 1273044 | 45 | 27 |
| 1273045 | 48 | 24 |
| 1273048 | 30 | 18 |
| 1273049 | 19 | 15 |
| 1273050 | 30 | 31 |
| 1273051 | 17 | 21 |
| 1273052 | 14 | 15 |
| 1273055 | 14 | 20 |
| 1273056 | 16 | 22 |
| 1273057 | 16 | 18 |
| 1273058 | 20 | 22 |
| 1273059 | 16 | 17 |
| 1273060 | 36 | 35 |
| 1273084 | 41 | 35 |
| 1273087 | 12 | 14 |
| 1273088 | 33 | 28 |
| 1273090 | 24 | 41 |
| 1273091 | 26 | 31 |
| 1273092 | 37 | 38 |
| 1273093 | 28 | 23 |
| 1273098 | 17 | 23 |
| 1273099 | 14 | 10 |
| 1273101 | 29 | 32 |
| 1273102 | 20 | 18 |
| 1273103 | 12 | 5 |
| 1273104 | 57 | 16 |
| 1273105 | 34 | 9 |
| 1273106 | 30 | 11 |
| 1273107 | 24 | 8 |
| 1273108 | 31 | 13 |
| 1273109 | 30 | 13 |
| 1273110 | 37 | 8 |
| 1273111 | 46 | 12 |
| 1273113 | 25 | 10 |
| 1273114 | 46 | 26 |
| 1273115 | 15 | 7 |
| 1165523 | 38 | 17 |
| 1165533 | 31 | 19 |
| 1165538 | 64 | 25 |
| 1165550 | 47 | 11 |
| 1165563 | 30 | 12 |
| 1165586 | 35 | 19 |
| 1165596 | 69 | 49 |
| 1165616 | 109 | 25 |
| 1165855 | 49 | 16 |
| 1165897 | 39 | 28 |
| 1179808 | 83 | 36 |
| 1179841 | 22 | 9 |
| 1179843 | 22 | 11 |

### Example 14: Activity of Modified Oligonucleotides Complementary to Human UBE3A-ATS in Transgenic Mice, Multiple Doses

[0489] Modified oligonucleotides described above were tested in the UBE3A-ATS BAC transgenic mouse model RP11-748 line.

### Treatment

[0490] The UBE3A-ATS transgenic mice were divided into groups of 3 mice each. Each mouse received a single ICV bolus of 10, 30, 100, 300, or 700 μg of modified oligonucleotide. and sacrificed two weeks later. A group of 8 mice received PBS as a negative control.

### RNA Analysis

[0491] After two weeks, mice were sacrificed, and RNA was extracted from cortical brain tissue, hippocampal brain tissue, and spinal cords for real-time PCR analysis of measurement of RNA expression of UBE3A-ATS using primer probe set RTS40595 (forward sequence TCCTTCCCTACCTTAGTCTTGA, designated herein as SEQ ID NO: 14; reverse sequence CCCTCTTGAACCAGGAAACA, designated herein as SEQ ID NO: 15; probe sequence AGATGGCAGCCCACATTTCTACTGT, designated herein as SEQ ID NO: 16). Results are presented as percent change of RNA, relative to PBS control, normalized to mouse GAPDH (measured by primer-probe set RTS108).

[0492] As shown in the table below, treatment with modified oligonucleotides resulted in dose-dependent reduction of UBE3A-ATS RNA in comparison to the PBS control.

TABLE 118
Dose-dependent percent reduction of human
UBE3A-ATS RNA in transgenic mice

| | | Cortex | | Hippocampus | | Spinal Cord | |
|---|---|---|---|---|---|---|---|
| | | UBE3A- | | UBE3A- | | UBE3A- | |
| Compound | Dose | ATS RNA | ED50 | ATS RNA | ED50 | ATS RNA | ED50 |
| ID | (μg) | (% control) | (μg) | (% control) | (μg) | (% control) | (μg) |
| PBS | 0 | 100 | — | 100 | — | 100 | — |
| 749860 | 10 | 98.16531 | 138 | 81.99485 | 109 | 59.65406 | 17 |
| | 30 | 84.95562 | | 91.16468 | | 45.18495 | |
| | 100 | 67.32992 | | 52.07824 | | 25.79271 | |
| | 300 | 26.23195 | | 33.3197 | | 10.36557 | |
| | 700 | 11.97921 | | 16.72183 | | 9.517061 | |
| 1065645 | 10 | 90.14288 | 74 | 88.23692 | 71 | 37.14751 | 6 |
| | 30 | 72.43123 | | 66.81222 | | 16.11173 | |
| | 100 | 49.12943 | | 51.83015 | | 10.87515 | |
| | 300 | 16.34235 | | 25.55912 | | 7.843655 | |
| 1263461 | 10 | 88.27412 | 94 | 86.23292 | 126 | 60.06681 | 14 |
| | 30 | 81.19946 | | 84.36883 | | 33.7366 | |
| | 100 | 55.94376 | | 68.69458 | | 21.85816 | |
| | 300 | 16.25568 | | 23.08811 | | 28.43356 | |
| | 700 | 11.55421 | | 20.98394 | | 18.26012 | |
| 1263486 | 10 | 84.88829 | 91 | 88.16814 | 110 | 80.05438 | 49 |
| | 30 | 73.65319 | | 88.23227 | | 67.24883 | |
| | 100 | 53.51549 | | 46.18175 | | 35.76668 | |
| | 300 | 29.17494 | | 39.41106 | | 25.80888 | |
| | 700 | 13.16333 | | 21.58236 | | 14.67831 | |
| 1263517 | 10 | 61.99356 | 27 | 78.62965 | 38 | 28.43223 | 5 |
| | 30 | 57.35782 | | 64.77742 | | 4.093424 | |
| | 100 | 28.22543 | | 31.27599 | | 3.855931 | |
| | 300 | 13.48909 | | 11.49965 | | 2.253222 | |
| | 700 | 6.218008 | | 9.114471 | | 0.845911 | |
| 1263518 | 10 | 83.49507 | 47 | 74.9207 | 36 | 7.813722 | N.C. |
| | 30 | 63.00462 | | 58.90944 | | 6.925703 | |
| | 100 | 36.83505 | | 35.79351 | | 9.984906 | |
| | 300 | 10.60636 | | 16.33499 | | 22.15675 | |
| 1263532 | 10 | 87.76102 | 437 | 104.2908 | 508 | 85.92361 | 126 |
| | 30 | 93.21178 | | 107.4279 | | 86.97925 | |
| | 100 | 82.08274 | | 79.80543 | | 56.10128 | |
| | 300 | 63.11973 | | 71.02516 | | 37.9068 | |
| 1263533 | 10 | 85.64712 | 62 | 91.08657 | 93 | 79.33594 | 35 |
| | 30 | 74.82061 | | 92.99996 | | 56.07265 | |
| | 100 | 37.83251 | | 50.48182 | | 32.95345 | |
| | 300 | 17.85169 | | 15.11169 | | 16.13775 | |
| | 700 | 13.22447 | | 16.26845 | | 14.77717 | |
| 1263537 | 10 | 99.27557 | 167 | 101.6452 | 149 | 58.69295 | 32 |
| | 30 | 61.11154 | | 67.12889 | | 57.56289 | |
| | 100 | 70.65222 | | 60.23925 | | 35.5374 | |
| | 300 | 35.35647 | | 38.67746 | | 31.30235 | |
| | 700 | 37.55784 | | 42.24916 | | 26.47357 | |
| 1272944 | 10 | 85.26636 | 171 | 98.97738 | 241 | 86.06921 | 66 |
| | 30 | 83.3624 | | 91.08809 | | 60.22092 | |
| | 100 | 64.40395 | | 69.68625 | | 45.39798 | |
| | 300 | 47.00232 | | 54.90247 | | 34.02307 | |
| | 700 | 18.19851 | | 26.34956 | | 26.27892 | |
| 1273033 | 10 | 92.81903 | 159 | 104.9703 | 202 | 71.92708 | 27 |
| | 30 | 86.45458 | | 92.23621 | | 47.44761 | |
| | 100 | 71.94214 | | 74.17289 | | 34.27954 | |
| | 300 | 28.94805 | | 34.12991 | | 17.19729 | |
| | 700 | 19.14991 | | 35.15452 | | 16.60517 | |
| 1273039 | 10 | 84.62214 | 63 | 93.89685 | 77 | 52.24285 | 33 |
| | 30 | 70.19074 | | 70.45983 | | 45.93645 | |
| | 100 | 40.06878 | | 45.44749 | | 30.60229 | |
| | 300 | 22.18407 | | 28.77613 | | 27.68067 | |
| | 700 | 16.46246 | | 23.35814 | | 20.2156 | |
| 1273050 | 10 | 60.65157 | 34 | 76.1426 | 178 | 108.4293 | 45 |
| | 30 | 46.72804 | | 76.65907 | | 59.53868 | |
| | 100 | 42.13233 | | 63.21802 | | 30.24442 | |
| | 300 | 35.42049 | | 42.84989 | | 16.76795 | |
| | 700 | 27.88596 | | 44.42969 | | 16.65603 | |
| 1273055 | 10 | 54.09476 | 104 | 101.4753 | 139 | 95.64317 | 46 |
| | 30 | 75.60993 | | 80.40454 | | 46.396 | |
| | 100 | 62.55598 | | 61.10855 | | 43.64926 | |
| | 300 | 37.44794 | | 36.83808 | | 26.42752 | |
| | 700 | 18.68964 | | 24.28962 | | 17.02671 | |
| 1273062 | 10 | 83.90397 | 65 | 91.25815 | 65 | 96.79799 | 85 |
| | 30 | 71.94265 | | 68.4521 | | 78.51707 | |
| | 100 | 41.74674 | | 43.10219 | | 45.07505 | |
| | 300 | 23.62598 | | 26.78065 | | 25.9929 | |
| | 700 | 8.048482 | | 17.65158 | | 20.9903 | |
| 1273090 | 10 | 51.37967 | 25 | 83.05922 | 143 | 94.48769 | 120 |
| | 30 | 53.46583 | | 70.46917 | | 79.90936 | |
| | 100 | 41.09529 | | 69.46586 | | 53.85753 | |
| | 300 | 25.47022 | | 49.33954 | | 51.06804 | |
| 1273091 | 10 | 48.66948 | 28 | 86.34518 | 195 | 126.1334 | 240 |
| | 30 | 49.31716 | | 78.33165 | | 118.9585 | |
| | 100 | 48.19272 | | 67.14459 | | 75.20145 | |
| | 300 | 31.19941 | | 48.97407 | | 42.91308 | |
| | 700 | 28.63277 | | 34.46767 | | 43.51426 | |

### Example 15: Tolerability of Modified Oligonucleotides Complementary to Human UBE3a-ATS in Wild-Type Mice. 3 Hour and 2 Week Study

[0493] Modified oligonucleotides closely matched to LNA/DNA oligonucleotides described in WO2017/081223 were tested in female wild-type C57/B316 mice to assess the tolerability of the oligonucleotides. See, Certain Comparator Compounds, hereinabove. Wild-type female C57/1B16 mice each received a single ICV dose of 700 g of modified oligonucleotide listed in the table below. Each treatment group consisted of 4 mice. A group of 4 mice received PBS as a negative control for the experiment. At 3 hours post-injection and 2 weeks post-injection, mice were evaluated according to seven different criteria. The criteria are (1) the mouse was bright, alert, and responsive; (2) the mouse was standing or hunched without stimuli; (3) the mouse showed any movement without stimuli; (4) the mouse demonstrated forward movement after it was lifted; (5) the mouse demonstrated any movement after it was lifted; (6) the mouse responded to tail pinching; (7) regular breathing. For each of the 7 criteria, a mouse was given a subscore of 0 if it met the criteria and 1 if it did not (the functional observational battery score or FOB). After all 7 criteria were evaluated, the scores were summed for each mouse and averaged within each treatment group. The results are presented in the table below.

TABLE 119
Tolerability scores in mice at 700 μg dose

| | | | SEQ ID | SEQ | | |
|---|---|---|---|---|---|---|
| | | | NO: 1 | ID NO: | Chemistry | SEQ |
| Compound | 3 hr | 2 week | Start | 1 Stop | Notation | ID |
| ID | FOB | FOB | Site | Site | (5′ to 3′) | NO |
| PBS | 0.0 | 0.0 | | | | |
| 1219022 | 7.0 | n.d. | 468275 | 468294 | AₗₛAₗₛA_{ds}T_{d}STₗₛ | 2905 |
| | | | | | A_{ds}TₗₛT_{ds}T_{ds}A_{d}S | |
| | | | | | T_{ds}A_{ds}^{m}C_{ds}A_{ds}^{m}C_{ds} | |
| | | | | | ^{m}C_{ds}AₗₛTₗₛ^{m}CₗₛAₗ | |
| 1219023 | 1.0 | 3.5 | 462549 | 462566 | TₗₛTₗₛTₗₛA_{ds}T_{ds} | 2906 |
| | | | | | ^{m}CₗₛA_{ds}A_{ds}T_{ds}A_{ds} | |
| | | | | | T_{ds}^{m}C_{ds}T_{ds}T_{ds}^{m}C_{ds} | |
| | | | | | Tₗₛ^{m}CₗₛAₗ | |
| 1219024 | 5.3 | 6.5 | 471876 | 471894 | Gₗₛ^{m}C_{ds}Aₗₛ^{m}C_{ds}Aₗₛ | 2907 |
| | | | | | T_{d}ST_{ds}^{m}C_{ds}T_{ds}T_{ds} | |
| | | | | | T_{ds}^{m}C_{ds}T_{ds}A_{ds}T_{ds} | |
| | | | | | A_{ds}^{m}C_{ds}^{m}CₗₛTₗ | |
| 1219025 | 4.0 | 6.0 | 461987 | 462003 | TₗₛTₗₛA_{ds}TₗₛAₗₛ | 2908 |
| | | | | | G_{ds}^{m}C_{ds}^{m}C_{ds}A_{ds} | |
| | | | | | T_{ds}T_{ds}^{m}C_{ds}T_{ds}A_{ds} | |
| | | | | | T_{ds}^{m}CₗₛTₗ | |
| 1219026 | 1.0 | 6.0 | 487371 | 487387 | ^{m}CₗₛT_{ds}^{m}CₗₛAₗₛ | 2909 |
| | | | | | AₗₛA_{ds}G_{ds}A_{d}ST_{d}S | |
| | | | | | ^{m}C_{ds}A_{ds}T_{ds}T_{ds} | |
| | | | | | ^{m}CₗₛTₗₛ^{m}CₗₛAₗ | |
| 1219027 | 1.0 | 0.0 | 487430 | 487449 | TₗₛT_{ds}Aₗₛ^{m}C_{ds}Aₗₛ | 2910 |
| | | | | | ^{m}C_{ds}TₗₛT_{ds}A_{ds}A_{ds} | |
| | | | | | T_{ds}T_{ds}A_{ds}T_{ds}A_{ds} | |
| | | | | | ^{m}C_{ds}T1ST_{ds}^{m}Cₗₛ^{m}Cₗ | |
| 1219028 | 6.0 | 6.0 | 496570 | 496587 | GₗₛT_{ds}T_{ds}T_{ds}^{m}C_{ds} | 2911 |
| | | | | | ^{m}C_{ds}A_{ds}T_{ds}^{m}C_{ds}T_{ds} | |
| | | | | | A_{ds}^{m}C_{ds}TₗₛAₗₛT_{ds} | |
| | | | | | TₗₛAₗₛAₗ | |
| 1219029 | 6.3 | 6.0 | 503154 | 503170 | ^{m}CₗₛTₗₛG_{d}ST_{ds}Aₗₛ | 2912 |
| | | | | | T_{ds}A_{ds}^{m}C_{ds}A_{ds}^{m}C_{ds} | |
| | | | | | ^{m}C_{ds}A_{ds}T_{ds}^{m}C_{ds}^{m}C_{d} | |
| | | | | | ₛ^{m}CₗₛAₗ | |
| 1219030 | 5.0 | 5.0 | 487478 | 487494 | AₗₛG_{ds}T_{ds}Tₗₛ^{m}Cₗₛ | 2913 |
| | | | | | T_{ds}A_{ds}^{m}C_{ds}T_{ds}A_{ds} | |
| | | | | | T_{ds}A_{ds}^{m}C_{ds}TₗₛTₗₛ | |
| | | | | | Tₗₛ^{m}Cₗ | |
| 1219031 | 5.3 | 6.0 | 464879 | 464898 | TₗₛAₗₛT_{ds}A_{ds}^{m}Cₗₛ | 2914 |
| | | | | | ^{m}C_{ds}TₗₛT_{ds}T_{ds}^{m}C_{ds} | |
| | | | | | T_{ds}T_{ds}T_{ds}A_{ds}A_{ds} | |
| | | | | | ^{m}C_{ds}^{m}C_{ds}^{m}C_{ds}TₗₛTₗ | |

A subscript “l” indicates a 4′-2′ LNA modified sugar moiety, a subscript “d” indicates a 2′-β-D-deoxyribosyl sugar moiety, a subscript “s” indicates a phosphorothioate internucleoside linkage, and a superscript “m” before a C indicates 5-methyl cytosine.
n.d. means no data; not tested.

### Example 16: Tolerability of Modified Oligonucleotides Complementary to Human UBE3a-ATS in Rats, 8 Week Study

[0494] Modified oligonucleotides described above were tested in rats to assess the tolerability of the oligonucleotides. Groups of male, 6-8 week old Sprague Dawley rats each received a single intrathecal (IT) dose of 3 mg of oligonucleotide as listed in the table below. Each treatment group consisted of 4 rats, approximately matched for starting weights. A group of four rats received PBS as a negative control. The rats were weighed before dosing, and were weighed again at 8 weeks post-dose. Rats are expected to gain weight over the course of the study due to growth; too little weight gain is a sign of compound toxicity. Absolute values of body weight change were normalized to the body weight change observed in PBS-treated groups to allow comparison between two studies with different average starting weights for the rats, with the body weight change of the PBS group set to 100%. Statistical significance (p-value) of the change in body weight compared to the PBS-treated group was calculated by a two-tailed Welch's T-test in Excel (two sample, unequal variance). A p-value of <0.05 indicates that there is less than a 5% chance that the observed differences are due to random sampling errors.

TABLE 120
Body Weight Change in Rats at 8 weeks post-dose

| Compound | B.W. change | |
|---|---|---|
| ID | as % PBS | p-value |
| PBS | 100 | n/a |
| 1219027 | 87 | 0.03 |
| 1065645 | 101 | 0.83 |
| 1263517 | 100 | 0.91 |
| 1263518 | 103 | 0.50 |
| 1263533 | 100 | 0.99 |
| 1273039 | 105 | 0.26 |
| 1273062 | 100 | 0.98 |

1.-89. (canceled)

90. A modified oligonucleotide according to the following chemical structure:

[chemical structure]

91. The modified oligonucleotide of claim 90 which is the sodium salt or the potassium salt.

92. A modified oligonucleotide corresponding to the following chemical structure:

[chemical structure]

93. A compound comprising a modified oligonucleotide according to the following chemical notation: Tₑₛ^{m}CₑₒAₑₒ^{m}Cₑₒ^{m}CₑₒAₑₒT_{ds}T_{ds}T_{ds}T_{ds}G_{ds}A_{ds}^{m}C_{ds}^{m}C_{ds}T_{ds}T_{ds}^{m}CₑₒTₑₛTₑₛAₑ (SEQ ID NO: 2918), wherein:
A=an adenine nucleobase,
mC=a 5-methyl cytosine nucleobase,
G=a guanine nucleobase,
T=a thymine nucleobase,
e=a 2′-O(CH₂)₂OCH₃ β-D-ribosyl sugar moiety sugar moiety,
d=a 2′-β-D-deoxyribosyl sugar moiety,
s=a phosphorothioate internucleoside linkage, and
o=a phosphodiester internucleoside linkage.

94. The compound of claim 93, comprising the modified oligonucleotide covalently linked to a conjugate group.

95. A pharmaceutical composition comprising the modified oligonucleotide of claim 90 and a pharmaceutically acceptable carrier or diluent.

96. The pharmaceutical composition of claim 95, wherein the pharmaceutically acceptable diluent is artificial cerebrospinal fluid.

97. The pharmaceutical composition of claim 96, wherein the pharmaceutical composition consists essentially of the modified oligonucleotide and artificial cerebrospinal fluid.

98. A pharmaceutical composition comprising the modified oligonucleotide of claim 92 and a pharmaceutically acceptable carrier or diluent.

99. The pharmaceutical composition of claim 98, wherein the pharmaceutically acceptable diluent is artificial cerebrospinal fluid.

100. The pharmaceutical composition of claim 99, wherein the pharmaceutical composition consists essentially of the modified oligonucleotide and artificial cerebrospinal fluid.

101. A pharmaceutical composition comprising the compound of claim 93 and a pharmaceutically acceptable diluent or carrier.

102. The pharmaceutical composition of claim 101, wherein the pharmaceutically acceptable diluent is artificial cerebrospinal fluid.

103. The pharmaceutical composition of claim 102, wherein the pharmaceutical composition consists essentially of the compound and artificial cerebrospinal fluid.

104. A pharmaceutical composition comprising the compound of claim 94 and a pharmaceutically acceptable diluent or carrier.

105. The pharmaceutical composition of claim 104, wherein the pharmaceutically acceptable diluent is artificial cerebrospinal fluid.

106. The pharmaceutical composition of claim 105, wherein the pharmaceutical composition consists essentially of the compound and artificial cerebrospinal fluid.

107. A method comprising administering to a subject the pharmaceutical composition of claim 95.

108. A method of treating Angelman Syndrome, comprising administering to an individual having or at risk for developing Angelman Syndrome a therapeutically effective amount of the pharmaceutical composition of claim 95.

The application's sequence listing, which the Patent Office published only in electronic form, follows.

SEQUENCE LISTING (2932 sequences)

SEQ ID NO: 1 - DNA, 619382 bp, Homo sapiens
  source 1..619382: mol_type = genomic DNA
ttatatgaatgcacatgaacctgtcctagaaaccttccattgacaccttcttttaatgtcatcaacacaaaacttgcagaggagctgtcagcaggttggaaagataatctcacagagtgttgcgtaggaatctcacaagaaatgaaatatcaccaaagcttctggttaacagagaagatgataatgaggagaaaatcataagaaagatgaatagtgactcagaagaggtgcatctggatgagagaaatttatcaatatctttatttttctattttttgagacagagtcttgctctgtcacccaagctggagtgcagtggcacaatctcggtccactgcaacttccatctcccgggttcaagcaattcttctgcctcagtctcccaagtagctgggattacaggcacacactaccacaccgggcaaatttttgtatttttagtagagaattttttttttttttttttttgagatggagtctcactctgttgctgaggctggagtgcagtggcacaatctcggctcactgcaagctccgcctcccaggttcacgccattctcctgcctcagcctcctgagtagctgaggggactacaggcacctgccaccacacctggctaattttttgtatttttagtagagatggggtttcaccgtgttagccaggatggtctcgatctcctgacctcaggatcctcccgcctcggcctcccaaagtgctgggattacaagtgtgagccaccgcgccgagcagcaataccttttttaacgtgatttgcttatatttgcatctcattggagtgatataaaacaaatatccacatttatatatgtcgaaaagagttattgtcattaattgtgaggtaaaaattataaggtgtaggaagtatttgtaccatatcttgtcaatgattttattcctttactatggcgtaaaataatgatgtattttacaattgatacaaaaaatatatttaaattacttagaaaacactgtcaatattagcatactgatgttgtgattagtatagacctgatatttatctacaggcattatgtatcattagttcattcatttctcccaaaatatcaaaaggtaggttctattaccactcctaagtacaagttctgaatttgagctaaagccctgcaaaaaaagggctgtctccatagtccttgctcacataaactatgttagaaaatgtttttctgttaaattgtgaatacattgtaggtctaatttaataaatcttatgctagcctatagtcatgaagatattttcctaacataggttgtaaatactgtattaaaaggtatttatatttgggtctatgatgcacctgcaattaattttatgtgtaatgtgaagttaaaggtacatttaacttcccccaatgaacattaatttcctagaacattgattgtaaaagccatctttctactaataactgctcttattaattatttgcatttatattattttgtctgttttgagctttcctttatttcattggttcacctttctatctgtgcaaatattacattgtcttaattactaagagtcttcatttaatacaagaattttccatccacagccctttagcctatctactgtggtgttctaaaaggaagaaagaggctagtaaatcctggatactttgctcctacaccaatattcccagctgtaccttgaaataaaaggatttagaactttagaacattgctgttgttgcttatgtctctaatgttctcttgaatcttgacaatccccgaacactgctccccgctttatttgtttagtccagtcccagtgaaataaattagatgtcaaggctcctcattatggttgcctggtttttggaacctggggtactttgtactcctccagcaacagccagaggtggcagagagctgtcagtcatccctgggtgcctcctgcgcaagcgcagttgtcctcctgcgccgacctcgaatgcggtcctcctgctgcagaccacgcccaccaagggctggccgcagccactgtagctgagctcagagccttctgtgtggtttgcgggggcaaggtcagctgccccctgccctctctctggggctatttgaggaatgcggcctttttgcataagaaaggcttttctctacagtaactgtggtcgctgatcaatgacaccttcctggtaacatttcatattgcttttttggaggtgggggtgcagatatctttaaaacttgcatgcgattgtctttcttttaatcacataaacatcatttaaaaccaattcatattttgtattgtatattaatgcctttcattcctgtattttaaaatgctatcataatcatttttcgaaatacatatttaattattttcatctgttcaatcatctttctttagtaattaaatgaaaatagcactttattaagaaagacaaatgttacatattctctgttttagtgttttccagaaatttgctatgaaatacgactggttgaaaaggagagggtcagagactttcctgagagccacaggacaaaatttacttacaatcgcaggcttaaagaagctatgatagtttaaattacgtggcttagtttgttcttattgtggaaggtgcacaaggaattaatttgtgtagacagaacactgagagtcccattctgaatgcagagacagctactttgctaccgtgcaaatgagtgtcgtcatattgtttgtttttctccttacccaaaagctatagacattggcttgcatatttgagtattttcactttggttttgtaaatggctgcttgacttgccttcctacagaaaatccataatacagagatgtattattttcttactcctttatgagtgattagtttgcactgaaataaaaatgccactcaggaaatgtcatacatcttcaagcagcatatattttaatagtatcatcttgtagaaagggaattacaatctttatttcttctatatcaatgagcaaactacttttttaatttttatatgttcatttttattgacttagtcaatagtttacctactttttaggttttacgtgctccattaatgtccattgttttaggctgaacctttgacactcctcatatatcgtttgtatgagactagatggcaagtaaagataggattcctcaccctaggttaaacactaacttcctcttgaagaaacaacttaggagtccaaaaagcaggctaggaattgtttaggttctgcaatacgaattgtgcaaatgccaacaggattgaattgagagaaacacattctctaatgaaggactcattcctgcagggtggatctatgagattcaatagcaaatggctgttatacaagtaatgaaatcctcaatcttatggtctaaaagcgattctggggggcacttatttaagatacatgagatgtgaaaaagcaatggaccaagagcattgatagtttatggatatttttatttcacattattgatagagctttgtttgccaggcaatgctgcagtcaggcactcggggtttcaataccctatacagaaaatctcaagagcagaccttggttaatttttttaagtaaccctcatcttcattcttttattgtattatgacctcgcgccattgaccttaaatttcactacaaatttagaagaacctaatagtcattgcaaactagatagataatggtatttatgtaatgaaggacaagggaaagatgattcccaaatctgaaagaaactagaagttttctggggaaacaaatagaggagataagatttactggtttattcttcattgatgagagttgcgttctgttctgataaatggaaagctccattgaaattacagatggtcctcaacttaagttggggctacttcccaataaaccatattgaaaatggtttcataaattgaaaatatcaccataaattgaaatatcataaattgaaaatatcaccagtcaaaatgtgtttaacatgcctaccttactgaacatcatactttagtctagcctgtcttaagagtgctcagaacacttatatttgcctacatttgtacaaaatcatctaacagaaaccatattttataatgtgttaaatatctcatgtaacttattgaatactgcaatgaaaatgaaaagcagaatggttgtatgggtactcgaagtacaatttctactgaatgtgtattgctttctcacaattataaagttgggaaatctgaagtcatacctcagggagtgcttttattacacaatacaggtttatcagacgcatataccaacaaatcataggaaattcaggtttgggtcaagggggaggggttcaacctacttatacatatttccttcctctctgttgggctacctttatccttgggattgttgcaagatggccgtgtcatgtaaagggctgtgtcttttagcatcatgaataagatgaaagagttgaaggccaacttcattcaaatgtcttctcgatgtgtccttccctttttctcctggactgctctgtgatccatgtctctgtagaaaatggctggcataagtcaatttctgactgggagctgtcatgattactgtctcccactgttaacactgtacttggaggtcttgatggaattgggcaaacctgttctttcagaccctcagtttcatctcaacacaaaactctccaaaagtccttgctgctccacagcagggaactctcttgaagcaataacatgaggaaatagtgggcttgcatggctgcctcacattcctcaggtatcactgtgctcattgcctgatgtactgtgtcttgccaaccatcattccacgtaatttacccattcttggtttttacattggttaaggcatgtacaaaccctgttagtttttctgcagtatttggattcataccttctgaaattacttgacgattactgtgtctctggttatttgcttctagttggcaatacaaaggaacaatgtgaatgaaactcataaagaaaaacctatgatttaatgggcgtgtgtaacactagagggaaggtcagagttagtctatgcatgggtataggtaggagtctcagtgggtgtcagccattctgtgtcaacaaatcaaatatttaaggtggatctaaaagaaaggtaatatctctgccaattaaactagagtcacgcattgactaatggcaaatacagtctaagaagtgcatttttaggcaattttgtcattatgagaacaacgtagagagtacttacacaaacttagatggtatagcctactacatggctaggctatatggtaaagcatgttgcttctaggctacaaacctttactgaactgtaagcaatgataacacgatggtgtcatatcccatatatatacacatacacacacatacatatatatacatatactatagtaaaaatatgatataaaacattttttaactggtactgctgtttaaagcagatatcatgagtggattttgcaggaccggaagttcatccaggtgagtgagtgagtgagttgtgagtgaaggtgaaggtctagggcattattgtacactactgtagatttaagaaacactgtatgcagccgggcgcggtggctcacgcctgtaatcccagcactttgggaggccgaggcaggcggatcacgaggtcaggagattgagaccatcctggctaacacggtgaaacaccgtctctactaaaaatacaaaaaagttagtcgggtgcggtggcgggcgcctgtagtcccagcatactcaggaggctgaggcgggagaatggggtgaacctgggaggcagagcttccagtgagctgagatcgcgccactgcactctggcctgggtgaaagagcgagactctgtctcaaaaaaaaaaaaaaaaaaaagaaacactgtatgcttacgctatactaaatttattttaaaaacctgaagtaggccaggcgcagtagctcacgtctgtaatcccagcactttgggaggttgaggcaggaggatcacgaggtcaggagttcgagaccagcctgaccaagatggtgaaaccctgtctctactaaaaatacaaaaattagccgggcattgtggcacatgcctgtaatcccagctactcaggaggctgaggcaggagaatcacttgaacccaggaggcagaggttacagtgagccaagactgcaccactgcactccagactgggtgacaaagcgagactccatctcaaaaaaaaaaaaaaaatcctgaaatactaatgacattatgattgctacaatgtcacaagataagataaattttcaactccattgcaatcttatgggaccagcaacgtgcatattgtctgttgttgaccaaaacggcccttatgtggtacatgaccctatacacataacagcatattttatatttatggaaaaagcccttctagaattataaaatcacaagttttactcacataaaatttaacacaatattgagattaactcataaatgaaattataaaagtcttaaaattttgactatgatagttctaaacaagattttaatccagagaaatgaatgtgttcacgtaatcctctgtggcataaagagtaatggcaatgaaacatttcttaataaaacaggctgcatcattgtcagtgcgatttgcaccttcccgttgacatccattctgtaggtattgaatgcaggtgatcttacctgaaggtgacaacagaagattttattacaagatcacgcatgtgccctcaataacgccatgtcattgatgccaccagggtaacagctattgtgataaaatttgaaaaataaacatatgtggcttgaacccgggaggcggagcttgctgtgagctgagatcgcgccactgcactccagcctgggcgacagagcgagactccgtctcgaaaaaaacaagaaagaaaaaagaaagaaaaataaacatacgctaaaaatttagaaggatagtaagtaataagcatttgattgcttgagcccaggaattggaggctgctatgctctgtgatcacaactatgaatatccattgcactgcagcctgagaaatatagctaggctccatctctaaaaaagtaaataactaaataagtgtttgaaaatatttagcaaggaagccatactaatgtagctgaatcttggaaatcaagaaaaaaaattgttcgtttaaaagggcaaaattaaaaaattctttccagatagaaagaataggtgcagatgatagagcagcgtggcccaggggaggggctaagcagtggactaaggatggggaggctggagaagaggctgaggggagtcacatgttgtcctgagatgagaaagggaaaaaaagaaacatgttcatcttcaagtgcaaactctcttcagattgaaagaaagtttttagtttcttgggaagcagaaaagaatataggtgaggagtttgagagattcattaatttctttgtgaaattcaacataaaggaagatattctgtgttgctctttgttcactatatgtgtggggctcacagggaagcaatatagacaaagtttccaaattctcagatgttaaaggccaatggggattcagaaaacgcaacagaaactaaactgcaagtggaagagctgcccttgggagcccagagggcaagtttcaggcctggactgggtgggcaagggaggcctccaggaggaggagctttggaggagattgtggagagtgaggagcagtgagtccagcaaacagggcagggaaagcgaggaggaaacagtgtgtctgtggcacaggccagggcatgagaagagggtggtgggttggaaggaccactgggatgagtaatacatgaggaggcaggagaaggaagggcagaccatgcagggactgggcatgggggtgagggtgccgggcagctcagaaagtgatgcaggggccgctctctgaggactgcattctgtggggagggatttgaatgtctcagttcttttatgaaatgttatccccaatccatgaggtcttctgattcaggaaccagtcagaacaggtgagggtggccccagtccactgtgcaggaccattagcattgccaggaggggttggtgctgaggacaaaagagagtgaaaaggggcaaagaactttctttcctgtctgtcattttgcagatgtaagtgggatctgtggatctgaaaattcacagtggccagctcaccaccacctgatgaaagatacaccacagggtgagagcatcctaacagcaaactgcaaatgaggtgggtttgcagctgcacagagaagggaccccagggaagctacacgggcaaggcaggcaggggacttcagaggtggtagcagtgggtgttgatgaaattattctctgaggatatacacgtttgtcagtgtacgtgcatgaccgcttacatgttgatgttcgcatacaaaccccacaattttctcatgtttttcagagcatagcatgtattttgactttattctttctaccacacgtaaccatgccttgtatacctagcaatacttaacgtttatttttggtggattattcatggttaatgcatttcctgacttggtagccaaatgaaattaccttgctttacaggcctttggttgatcatttctgaagatttgtgtcgcctgaattcagtgggggtcacctctccatgatcttaagcaacagtcctgttgggactgttatgctatcctacttaactttggacttgtatgtcctggaaaatatgaaactatcgatactcacttgaaaattccaggtgctttaccttttactttgtttttgccgtgtttccaatgttatatattttctcccacttactttggattcaattgctctgcttccttttacagtaaaaatttagatgtttgaattttgggtttcaacttttctaatatatacacactcaatgctgtaattttcctctaagcttccctgttgtagctgacaaattttgatgaggtgtgttttcctttcaatttagttcaaattattttaaaaaatttctcttgagatttctttgacccatgtattatttggaaatgaattatataatctccacgtattttgcaattcaccagtttttaaaaattgatttctagcttaattctgttgtgttttgagtgcatacattgtattagtctgattcttttaaatggtttcaggtgtgttttatggaggagaatgtggtgcatctcgatgagtggtcctgtgggcttgagttcaatgtgtattctgcccgttgttggataaagtctgtagatgtcaattatatccaattgactgatgatactgttgagttcaactatgtccttactgattttttctgcttggtggatctgtctatttctgatagaggagtgttgaaagtctccaacgataatagcggattcatctatttcttattgtggttttaacagtttctgcctcacgtagactgatgccctgttgctctgttgttacatgcatatatattaaggatcattatattttcttggaaaatcgatccctttattatcacataaggtctttatccctgataattttcctgtatttacattacattctttctgaagctaataaagctatgcctgctttcttctggttactgttagcaaggtacattttgtttcattcatttacttttatatgtacttttactttttttacatttactcttattaattgacaaaatttgaggtattgactatgtaaaatcttcacatcatcttcaaacatgatgtttgaagaataatatatattgtgaagtgaaaaattcttgctaagaacatatgtgttacctcacacagttatttttcgtggcaagaacactttacatccactctttcttcatttttcataatgcaatttattgttaactatagttaccatgttgtacaatctcttgatctttttcttcctatctaactgaaattttgtacccattcacaatcatctacccatcctcatcccctaccacccttaggccctagtactcaccattctactttgtatttatataaatgagcttttttagattccgcttacacatgggttcatgtggtatttgtctttctcttcccggcatatttcatttaacatattgtcatgcagatacattcattctgcctccaatgacagtaattctccctttttaaggccgataatatcctgttttgcatatacactgcattctttttatccattaatctgttgatgggcacttaggttgatcccatatttggctattgtgactaattctggaatgaatgtgggagtgcagatatctatccaacacaccggatagtcaatgaaatctcccaaggcagattttattacctttggatatatacccagtaataagactgctcgatcaaagggtaattctattgtttttttttttaggatccttcacaatttttcccataattactatattgtactaatttacattcccaccgacagtacacatgttcccttttctccctatctttatcaacactaacttttgtcttttaaaatagccattctaacaagtgtgagatgatatctcattgatttaaatttgcaattgtctatgtatgtcttcatatttatacagatttccaatatacaagatataacggggacttgtttttagatctactctgacaatgtgtctttaattggtgcatttcaaccattgctactcaaagggattactgacatggttgtgagaggtgaggccagctggacttcctgggtcgagtggggacttggggaaatctcctgtcttacagaggattttaaaatgcactaatcagcgctctgtaaaatgcaccagtcagcaggattctaaaagtagccaattgaggggaggattgaaaaaagggcactctgataggacagaaatggaacatgggtggggacaataaaggaattaaagctggtaaccccagccagcagccacaatccgctggggtccctttccacgcaatggaaggtttgtctcttcgctcttcacaataagccttgctaccggtcactctttgggtccatggcatcttggactaagagtccaaggtcagttcaacttggtggagcaagctggcagttagatgaaaaatatacacagacttgctgcagctgtacagatgatgaacgtagaactcaaaagatgatggaggccgggcgcggtggctcagggcctgtaatcccagcactttgggaggccgaggcgggcggaccacgaggtcaggagatcgaggccatcctggctaacacggtgaaaccccgtctctactaaaaatacaaaaattagccaggcgtggtggcaggcgcctgcagtcccagctactcgggaggctgaggcaggagaatggcatgaacccgggaggcggagcttgcagtgagccaagattgcaccactgcattccagcctgggcgacagagcgagactctgtctcaaaaaaaaaaaaaaaaaaaaaaaaaaagatgatggaaacagagtagaaatgatgagaatgatgaatgatgcctggagcttggttcctgggttgctgtggtgttagatggtcacagagcagctttttggaagcttatgtccatgtctcctgctaacagtagatacttgattagaatggaacagaatgtttacctgatttttacttatagcacctggaatgctagtagtaaaatgtaagccctttggagacagaaaatttttcaattctgtgttttcagagcctaggataattcctctgacctcactggtgagaatacgtaggtgttaaactaatgcacggattaaactataagggcaaagaaaaaagttcccctttgtcctctgaaggttcactgaaaaatcaactggcaaaaggaagattaatagaagaaaaggtatgtaaaattttattttaaattgcatagggagggaaccacaaaagaatgatgacccagtgaggtacacacgtttatatatctgttttcatagaggaagaaggcgatgtgtaacatagactattattttaagaggcaatagaccatcaaggagaatgaacagacccaggaggcaggaagcagacattaggagaaggtgaggtgcagagctacgcaggaagagaggttgttgtttaatgcaaattaagtcctccagataatctcttggagctgacctcaaaagaacagacggtaggtgtgtctgggctggtgaggactcccagcctcttgatctttcctggttacttgatgagatccctggggaggatgttcaagaccattgcatttctttattttattttattttcagatggagtctcactctgttgcccaggctggagtgcagtggcatgatattggctcactgcaacctccacctaccagattcaagtgattctcttgcctcagcctcctgagcagctgggattacaggcgcctgccaccacacccagctaatttttgtatttttagtagagacggggtttcaccatgttggtcaggcttgtctcaaactcctgacctcgtgatccacctgccttggcctcccaaagtgctgggattacaggcgtgagccactgtgcccagcctgtaaatgcccatcccattatatttcttttgtaaagaagcttgcttggtcagataaggaaatttcagagaggctcttcctggacttgggagtgggagacaagattagagagaccttcattctgaggcaaattctaagacggctcagcatgacaaagcaccagtctttggtatatctgagccccaacaaaataaactgatttgtgtatgaagaatggagcttacagctcagacagcaaatcaatccttattgactcagttttcaacttcatctggattaccagatgcacagtgtgaaaataagtcatttgccagcctgagcaacatagcaagagcccgtctctataaaaagtgtaaaaatctagctgggcatggtagtgaccgtctgttgtcctagctactctgcagcctgagatgggagcatcacttgttacagtgagctgtgatcatgatcaggtcactgcactccaatctagctactgagtgagaccttgtctctctctctccctctctctctctctctctctctctatatatatatatatatatatatatatagccaggcgtggtggcagtcacctgtaatcccagctactcaggaggctgaggcaggagaatcgcttgaatctggtaggtggaggttaaagtgagctgagagtgccactgcactccagcctgggcaacagagcgagactccatctgaaaaaaaaaaaagaaatgcatataatatatatagtatatatagtatatatatctatatataaaatagatatatatagtatatatatctatatataaaatagatatatatagtatatatatctatatataaaaatatagatatatagtatatatatctatatataaaatatatagatatatatactatatatctatatataaaatatatagatatatatactatatataaaatatatagtatatatatgaaaataagttatttgtattcaaagcatcaaataaaattttgttttagttttctaaaaaaatacaagtaacatatataggcatgctgtttttcttcttatatgtgactacattactttagtatgtagcaaatatcatttgctagctgtagtaaatgtgcattgtcacattttgtccaattttgttcaaactttaatcaaatgcctaagaatttaaaattaccttaattttgtagaagcaaatcacagcttatcattttagatgttttacttacttatgagtctactatttcccacgttactgctgtttctggcctgcctgtggcagtattgccattcactggaacctgcttccataggaggagcatcctgatgtgtttaggaatactaaaattcagatcattccccatcagagttgtctattctgtttctccctctcatccccataatgaatgcatacattctttctgtttgtttggtaattattgggtcatttaaaatgaagactatgaaatgagaacagaaccactgaccaaaatgtacaactttttaaacgtaccatggggaagaaaggtccagaacctatgcgcggagtatgttactaatccagagagaaagtatatttaaaaacaacctgagtggtcaggaagtcaatttcttttttctttatttttttaagagagacagggtctcgctttgttgcccaggctggtctcgaactcctaggctcaagccatcttccctcttcggcctcccaaagggatcagtttctgaagtgagatgagtgagttgattccttgagcattgtcttaatatgctacggctaccataacaaagtaccagagactgggtggcttacgcaacagaagttaacgttctggaggctataacgttctagaggccggcaaggttgtattctttgtgacctctctacgtggctggcagatggccaccttctctctgtgctctcacctcttccttcccctgtgcttgcacatccctggttctctcatccaagcattctattcttatagggacaccaggcagataggatttggcccaccttaatgacctcatttaccttaatcatctaatagaaggccctatgtccaaacagtcacattctgagacactgggggtgagggctctgcaggggagaaaaataatacctttccttcacctgctgcaaggttcgtggctgagtcctcataacaaaatccagattaacaaaagaaaagtatgcaaatgcattttttttttgagacggagcctcacttctgttgcccaggctggagtgcagtggtgtgatctctgctaaccacaaactctgcgtcccgttttcaagcgattctcctgcctcagtctcccgagtagctgggactataggcgcccaccaccacacccagctaatttgtgtattttttagtaaagatggggtttcaccatgttggccaggctggtctcaaactcctgatctcaggtgatccgccctgctcggcctcccagagtgctgggattataggcgtgatccaccacgcccagccacaaatgcatttaatgtaagttttatgtgacacaggagactacggaaatgaaaactcaaacatctagggagaactgtgcatttttatggacagtcatttagaagtatgattggaggacaaaagggtatgatctaatggtaataaactgggaggaacttaccaaggcctgactgttcaggttcttcttggcctccaagtttgatattccttcccttcgggcatagggcagaatacctgtcacatgagggtcttcaggagagaagaggtgggagcaggtcatttcaaacctttctccctctggagttttctgtctcctccagcttaaaatccttagtgtgccagggtgccatacattggggtagtatttcctgtactccagtagcttcaatgtataaatcttagccacaacaagcatgaatagagatttcaagctacagaaggaagcaaaggactaccgagaggtaaagatgtccaaaggtaactctggcgaaaagaatgaactccttgtacagctgtgaatgggagtttgggcaagcgttaagtctgaacctacctataggtgggactcttaaccattttatatttatgcagagcgagtaaatggaaaaatcccgtggaaaaacactaatcatatattgcgacttgagggggctacagatttttttttttttttgaggtggagtctcactgtgtagcccaggctggagtgcagtggctgcgatcttggctcactgcaagctccgcctcctgggttcacgccattctcctgcctcagcctcccgagtagctgggactacaggcgcccaccaccatgcctggctaatttttttgtatttttggtagagacggggtttcaccgtgttagctaggatggtctcgatctcctgacttcgtgatccacccgcctcggccacccaaagtgctgggattacaggcgtgagccaccatgcccggcttggggggctactgatttaaagaaagaaagattaaaaggattttgatgcaataactctttaaattttttttttttgagttggagtctcactctgtcgcccaggccagaatgcagtggtacaatcttggctcactgcaacctccgcctcctggttcaagggattttccagcctcagccttccaagtagctgggattatagcatgcaccacaatgcccagctaatttttgtatttttagtagagacagggtttcaccatgtttgccaggctggtcttgaactcctgacctcagaagatccgcctgcctcggcctcccaaagtgctgagattacaggcatgagccactgtgcccggccaactctttatttatttatttttttttttttgagacggagtctcgctctgtcgcctaggctggagtacagtggtccaatctcggctcgctgcaagctccacctccctggttcaagtgattctccagcctcagcctcccaagtagctgggactacaggcacctgccaccacgcccaggtaaaatttttgtatttttagtagagacggggtttcaccgcgttagccaggatggtctcaatctcctgacctcgtgatccacccgcctcggcctcccaaagtgctgggattacaggcgtgagccaccatgcccggcgccaactctttaatttttaaaattgggtttctggaggtgatatccatccttttccagtacacagtttatagagtttcaacaaatacatactgtcatgaaattaccaccgtaatcaatgtttcccatagtggccacagcttgggaaatcctaacaaaggctttaggcttcctggcctctgctgccatgaccctgtagaaagaatggattacgagattcgttcccacctgcccctccctgggtctcagatcttccctatctatcagataaggattggattgagctggtgtagccagtttgtctgtccctgtgctgaggttactacttctgctggcacccaaagcacttgttatagatctaaacaagttgatttcagtcatccagtccagcaagggaggacatgtcctatataaacttgatgtgcctgataacataagccaccccactggaagtatcagatgtttcccgcactactagagggttcctagcaccctggtcctccctgatcctgtcccccaacactgtgagatcccatagaaagtgggggtcaccttggggaacactgccataaaattagagttagggggccctttctggggttttatggtggcctgaaccacaaaccacccccaagaacatgcactttgaagagaaaaggaaaaagaatggtagggaacactgaggttggaatttcacaggaacagcctaattagccagctacctggtccacctccatccacatcaagctcagtgtttcccaacatgtgctgcagtgccccatttcccatgcattggagtgtagtgtttagtgttcatactactagatagaagtaccgcctcctgagcaggccttcttgatgtcctatcttcagttgctttggctgttccattgttcagtagctccattggcttgcagatgacagggtgcatacaaagcccatcatattccatgagagcatggccattgttttgctggtcatgtagtgaaggatgcttcttggtgagactgaggtcctctggggtgttcaaaatcatgacataagttctcctcaataacagcaatggtagtatcagcatccacaagcgtgcatattttttgtcctttccaagtagcaagctgttttgatagtctttgtccccacaaagaggctctttaaatattctagtcactcaattgccattccctgatgaggtatgtaggctgtcagcaacggcccacacattggtgaaatgcaggaagacctggtggtaggggtggcctgcatggtcatcacaaatgcgtgttgtttggtccactgggcaaattgccaaggtttattctgacaaatgatgatgacaaccacagcctaacagaccccatctgctctgttgtttcactgagccatcagtaaaccatgccacaccatcagcaggcttgtcttggagccttaggctccagacagccatgggaggagccaaagcacacccagtggttctcttggtgtcttctaattagctagccatttgttcacggagcctgctggtcacatgtggtcctagctgggcctgaacttgaatgcaccacttccatttgataagtgaagtctatggagcctgtctaattttattggttgagcttgtgagccatccagagagaaatggcagttcaggttgcagagtttcatctggcattctggccacgaggtgcccagtccaaaacagtacccaatatcaagtaaggattgccatttaaaagagggatataggccgggcgtggtggctcatgcctgtaatcccagcagtttgggaggccaaggcgggtggatcacctgaggtcaggagttcgagaccagcctgaccaatgtgatgaaaccccatctctactaaaaatagaaaaattagccggacatggtggcatgcgcctgtaatcccagctattcaggaggctgagacaggagaattgcttgaacccgggaggcagaggtttcaatgagccgagattgcaccattgcactctaacctgggcaacaaaagtgaaactccatctcaaaaaaataaaataaaataaagagggatatttggtggctgcctgaggcaacttatgtgtccaagatctgagaggctggtacaccccagtgtcagttttctgttgccagagacatccatcactgtgcatcaggttgcacacaactgtgatttcatctggctagcacatttaaggtttaaaaggaagtgcctgagacacaaattgttgtaaacctgctgctgcaaagggttccattcaaagtgtgtggctttattggttaccttgactctgggtgccagaagaacccccatgtgagatgcatgttgtctccagtacccaaagcgacctaaccagctgccaggcctcctttgtatccgtgagtgcagccaggggcttgcctgtatctgggatactgttttggcttcttgctcaggtagctttggcattcattgtgcccatggcctttttgaccagctaaactgggctgttacattgtgacaggtgggttgtcacttttttctttttttcgagacggagtcttgctctgtcacccaggctgacctggtgcgatcttggctctctctaacctccgcctcccaggtttaagcacttctcctgcctcagcctcctgagtagctgggattataggcgcccaccaccatgccctgctaatttttatattttagtagagacggggtttcaccatgttggccaggctgggcttaaactcctgacctcgtgattcacccacttcagcctcccaaagtgctgggattacaggcatgagcccccacggccagccggttgtcacatttttatctgtaacaagtaaatccagaattaataaaatagtgtcattgttccatttagtatgcagtaccactttttttaatgattcagtgcggcttgggtagcttaggtaacaggcaggagtggatacggcccactattgtgtcttagttcttagctgtgagggggcataatcttccaggacatcaatgcctataatgcactcagggtgggaaccagagccacctgcataaaaagttgctcacagggctctacccacaagtacataagcattgtgtgcagataagcatcacgggccaccagtttgttcccaaacctcccaatgtcatccgtttaattattctcctaaaaggacccagaaacattgtcatgtgggttccggtatccaagcacctgagaaaaaactgaagtcttctcttttctcctcttatcataacaagggtataaggccagagggcttcagtagggacctagaggccttggccccattcttaactgtgtcaatcagaccaagacacttaggtggcagtgttcctttatcaaacactcacaatagccacactgcgtaagatttccctggtcttcctccttatcctttcgagcctgactcttcccatcttctgggctgacattgtacgtgttagttcctctcatgcctcagggaccatacaaggacctctctctagtttcttcttgggtgcctcaggggctgtctgaatactcaccattcaagctcttgggccctgacaataagggatcacataagtgcccagcacctaggggaccttgaactatgatctgctgtttccacattcctttctctctgtctcagtccatgcagccagctcacttacatctgtggggaggagagtgacatgtcccatttaccacccatccttatccataactcatccaggtacatgtccagcccctgtgctcctgggctgatgtctctgccttgggctgagtactgggtggtattgcccctcccactttgccagaaagccatgtttctctgaccgaaccttacccactgcaccaatttttcaaagcaggttcaccaattaccaatcccaagggaggactccaccacacagaggacagcaaaggtcatcactataccagccatcaggaataggagtccagacacttctacccactgcatcctccgctgcagtgctacaactgcctgagagcagtgagacagaacacattctcaggcagtaagttaaaggatgcacatttattatttacagatagggagaaagtcttccttcaaaagaagcctaggctccattctgagctcatccccaaaggctcaagaagggttcccagggcagatgaagtctggattgcaaatgcccccctttcacacagctgaggaagcccaaaaggcagcccaccctgggttacatatctcagggcagacatggcgcattgagcaaagctttaaggaaatactgctttcagggcagagaggaacaaaccccagctctcctggacagtccctccctaactaaagatgtgacattccttaggaagggccagaacaaggccagggttgttccagacagtccctccctagctcagaatattgcattccaggctgatgctacacttattcttgacaaattaaaactgagaaaatgggaataattgaatccatccaaggccacctggaggactgttttgcattttcaccccaaaagttccttgtagtagtcttcccaccatatttagttttggaaattattgatatctatctccataactttgccttttacagaatgtcatataaatgaaatcattctgtatgtaatctttcagtaacactttcgagatatgtcatgtttactgtatcaatggtttgtttctttttgaaactgacctgtgctatattcaatgaatgtaccacaatttactcaattgtttatgtttttttttaagacagagtttcgctcctgttgcccaggttggagtgcaatcctgcaacctcggctcactgcaacctccacctcctgggctcaatgattctcctgcctcagcctctggagtactcatcatttttattaatataaaatgttataaatatggataacttgatggatatttgtgttgaggtattatatggttactacaagcatatggtttcattcatcttgggaaaatagatcttagcgctgagatgctggatcatataacaaaagtatgattcagaaggctggttgtggtggctcatgcctataatcccaacactttgggaggccaagatgggaggatcacttgaggccaacagttcaagagcagcttcgccaacatagtgaaaccccatctctactaaaaatacaaaacttggccgggtgcagtggctcatgcctgtaatcccagcactttgggaggctgaggcaggcggatcacctgagatcaggagttcaagaccagcctggccaacatggtgaaaccccgtctctactaaaaatacaaaagaaaattctccaggtgtggtggtgcatgcctataatcccagctactcaggaagctgagacaggagagtcacttgaacccacgaggcagaggttgcagtgagccgagatcataccactgcactccagcctggatgacagagtgagactccatcacaaacacacacacacacacacacacacacacagaaaacttagctaggcgtggtggcacacgcctgtaatcccagctcctcatgtggctagggcatgagaatagcttgaacctgggaggcagaggttgcagtgagctgagatggtgccactgcactccagcctgggcgatagagctgactctgtcttgaaaaaaaaaaaaaacgtatgattcactttacaagaaactgccaaaatgttttccaaagtggctatcattttgcatcctaacagaaaatatgggaatccccgttactccacatccttaccagcacttggtttggactctgtgtgtttgtgtgtgtctgtagtgtgtgtgtgtgtgtgtgtttgtgtgtgcgcatgagtaaatatatgtgtatatatgtatatatatcgactcttaataattccagtagggacatagtggcaccttactgtggtttcaataatttacatcttcctgctgataatggcattgaataaaactcattaacttgttcgtcatccatatctactatttgactgtcactcttctcatttcaaaaaatgtttattgttgtattattaaatttaactatgtatatgtataattttgatatgacctacatctgttaagtaccgaaaatatttttttctgagcctgtgccatctcgtctttctcttaacagtgtctgtcaaagagcagcatttattttaattttgactaagaataatttgtccttttttgttgtttttttttgagacagagtctgtctctgtcacccaggctggagtgcaatggcacagtcttggctcactgcaacttccgcctcctgggttgaagcgactctcctgcctcagcctcttgagtagctgggattacaggcaccctctatcatgcccggctaatttttgtacttttgtagagatggggtttcaccatgttggccaggctggtcttgaactcctgacctcaggtgatccacctgcctcagcttctcaaagtgctgggattacaggcatgagccactgtgcccagccaatttatccatttttaaattttgtgcttaatatttattccctaccattatatattgcttaacacaaggtcataaagattacctacagtattttccttagaaattttatgtgttaaggatttacatttatatctgtggtattttgaattaattttatatctagtgcaaaaaagggtgaagagttttgttttgtattttggcatatgaatgctctgttgttttaggagcttttgctacaaatactctcctttcttcaattcaagaaaattgaatttccgtggcacatgagtcaaaaacctaccaaccatatatgtatatgctataatgctccagttatctaaatatttatccttatacatatccatatatgaatatgcatatgctatacatacatacatatatgtatttgctatactgttccatttatctatttatccttacaccaataccacactatcttgactaataccacattatattaaacttgaaataatggccaggtgcggtggctcacgcctgtaatctggcactttgggaggccaaggcaggcagatcacctgaggtcgggagttcgagaccagcctgaccaacatggggaaaccccatctctactaaaaatacaaaaattagccgagtgtggtggcacatgcctgtaatcccagctactcgggagtctgaggcaggagaatcccttgaacctggcagacggaagttgcagtgagccgagatcatgcagttgcactccagcctgggcgacaagagcaaaactccgtctcaaaaaaaaagaaaagaaaagaaaacgtgaaataagtagtgagtcccccaatattgtcccttttcttctaaattggtttggctatactaattatttagtttcttacataaattttggaatctacttctcagtttctaaaaaaaatataaaaaatcagctgaggattctactgaatgtatagataaatatgtaagaattgacccttggtcaggcgtggtggctcaagactgtaatcccagcactttgggaggctgaggtgggtggatcacgacgtcaggagcttgagaccagcctgaccaaggcatggtgaaaccctgtctctactaaaaatacaaaaattagccgagcgtggtggcaagcgcctgtaatcccagctactcaggaggctaaggcaggagaatctcttgaacttgggaagtggaggttgcagtaagccaagatcgtgccactgcactccagctggggtgacagaacgagactccgtctcaaaaaaaaaaaaaattgatccttaatattgagctttccaatccattaaattggtatatctttatatttatttagatttttttgaatatcaatctgatcagcattttctaattcccagagcacacattttgcacacattttgtcaggtttatctcgaagtatatcacgtttttatgctattataaaatacattttaacttctatagtcaatttttcattatcagtataaaggaagtcaaccgattttcactcactcatttttacaaactaagcaaatctagtggcagccatgtggtatatacattgctacttgtgagggatggataaatgaaaaacatttctcctttatttgaggcatttgtcaagcagagatatgaacaaataggcaatgcaaatcagaggggttgtagtagggaatgtgcattattctgtggaaatccacaaaatgcatgggcatacaaaccaaatttaaatagtcatagaaggaatcctgcaggaagtaatttatgattgaataaagtagctgaaaaccatgcaaattagaattagacaagacaaaagaaggattagtattcaggtagagaccagggtgtgtctacaagtcaacatttttgagacatcacagggagagtaacaatttcagtacactgaaggaagttagaaatctatgtcagggctagatttttaagaaattttgttctgtgtcaataagttaggatttttatagttttctaaggttctattcagctactatggggtcgactcaagaatacagctgttgtaattgttaaaatgggaatttgggagtcttttgaatttgaaagaaaaaacaaatgtgcgggattgaggctcagaccctgtacaggcaaagaaaaagttaaaagtgaggaaaatgagagacaacataaactctgggaaaagtgttcacaaaaaattttagtattttcagggtagaagctcctcttgattgagtcataccttcctgcgaaagatacaaagtcagaaaagaaatcctctacctagaaaacgacattttggcaccaagcataggttactttcatgccttaatttcaccttaccagcatttcaaaatacctgctacactgtggtttgaggaatgagactactatgctcacagcgccacctagcatcaacagaaagggaggcccatggcaaacttaataacaagaggcgggaaaaaaaaggtgaggcccaggaaccggaaacttaatttgagcaggatttttcttatatttatttaaaaactaaaatattggccgggcactgtggctcatgcctgtaatcccaacacactgggaggccgaggcgggcagatcacttgaggccaggagttcaagaccagcctgggtaacacggtgaaaccctgtctctactaaaaatacaaaaattagtgggcatggtggcgggtgcctgtaatcccaactactgggaggctgaggcaggagaattgcttgaacctaggaggtggaggttgtagtgagccgagatcgcgccactgcactccagcctgggtgatagagtgagactctccctcaaaataataaaataatattgctgcaggggtcagtggtgaaatgcaatccataaccattcccagtaaacactcagcgagtcctggcccatgcccacttttcctgtcatttaacgcaagggttaaatatcaaagtgaatcccattatgctaattgatttacaaatacggatgtataggagtgtgataccctgagcgcaatcatacttcggatataactgtaaaacgacttcagctgactttgcagtgttgcagtgtcacattaaaccctaagttgtttgtgtttccctacacatcactctccaggagcattatagttcagaagattagagtaatttcttagactaaagccttgatgggttattattacataaaacgttttccactctgatggagaagtcaggtgcattcgctcatgtctccgtggcagggccgggactcctggtcccccgcgattctgagcggtgcctcacagcctaggtcctccaacctcacagggcggcccgcagcaaatgcgccactgtccggtgcggccaaccagctcgtggtgcgctgtgggaaggtcacaggacggagctggggggcgggggcggcggtgggggcgggggcggcggcgggggcgggggcgggggcgggggcagatcctatttgcgcctgcgcgggactggaggattcggtgttgccctttccccctgctatttccgtttccgcgcttcaagcggatctcttccggttatggcgcccgctgggagtgtcttatcagccgcttataccgcggaaactttaacctgcgttttcccgtaaaattttcctctctaggtttcgtatcattgtcttgtttcttactcttgtattaactttgttttaacctaaggtttctctttcccaaaaactgtggtgtttctttacaacctctttttatagttatataaacattgcaagaaccatgattttatattcttccttttcagtattaataacttcaatgtcttttttggcatttgtctgaaaatttgaaatatttttcaatttactgaactgattatcgttttgtaaatatcggatactactttaatcatttgtgtattggccttaagattctctatttttaactcttccaccaacatacctttaatctgagaggtgttgtaggggcttcaagatcaaactttccccacagtctctattttcattataaaataccgtgttttaagaaaaaatgtacaaggttgaaagaagtttcactactacgtgttttttttttaatttttattttattttattttattttgagacggagtctcgctctgtcaccaggctggagtgcagtggtgcggtctcggctcactgcaacccccgactccctggttcaggcagttctgccgccgactccctggttcaagcaattctgcctcaacctcccgggtagctgggattaccggcacatgccaccacgcccagctaatttttgtatttttagtagagatggggtttcaccatgttggccaggatggtcttgatttcctgacttcgtgatccacccgcctcagcctcccaaagtgctgggattacaggcgtgagccaccgcgctcggcctctactatgttttaaaacagtggctaggtcatgcttttctgtgtatccttacttcccttattccatcacctcatccatcactttacaactgatcatacaattacaaaattattttactaatcagattaaatgtgtgccttccatttgaagaagaaaggtctactaaaggcttagttttccctaggacactgggagaatacaggatctggtttccagtgccacagtggtgatcacacaggaataaacgggacacaggtcagacaacagccagaaagtcatctgccagtatatgtttcctgtgagatggacacctggtcccaggtcagacacaggtgttagagtgtcagctaggtaaaagaagtaacctgaaagagacacgctgtgaacaactatgtccacctccccttcatttcctagtattggagggctgctagctgctctgttactaggacccagatttagttggggcctctcagaacaggtcagaattgacctatgcacagtacctgtgggagtctggatgagggccatccactgaaagttagtgaatcaaagatttaagattgatctaaatgcaaatagatctgtgtcaaacgactatacgcataattgccttattttatacttattgaaaaaatcctcgtaaaattataaaggcataagatttacttgttatgaaaatgaaggcaataatgaacgtaattcataagtgaatttgcaaatatcttgaaattccaattctgatttttccaaattagattttgattcagagtcatcgatgtcttcacaccaccctctgtggcatgaacagagatggtaatgaagcatttcttagaaaacaaggctggaccactgtctgtgtgatttccacctttcttgctgacaccattctgcatgttttgatgtaagtgatgttaccagaaggaaacagcagaaggttgcaaaacaagtgcaaacaatgaaagccatgtcatggctgccaacaggctaatagtgattgtaacaacacttgacaaaataatttttaaaaattattcaaatatgataactaataacgatacagaattatcaagggaggtccaatttttttttttgtctgagacggagtctctctttgttgtccaggctggagtgcagtggcacgatctcggctctctgcaacctccctgacccaggttcaagcatttctcctgcctcagcctcctgagtagctgggattacaggcggctgccaccacacccagctaatttttgcatttttagtagagacggggtttcaccatgttttttggccaggctggtctcaaactcttgacctcaggtgatccacccgccttggcctcccaatgtactggaattacaggcgtgagccactgcacccggcctaagggagctctattaatggagctgaatctatgaaacaagaacatcttccttcatcaagggagcaaaactgtccagaaaaaaagtacagatgaggtagaaggagcctggtctatgtgttcatctttgtggtggattgagaatagggaggctggagaagaggctgagggggaagtcagggctcactcctgtcctaaaagcaaaagggagcaaaagaaccatgttcatcttcagattcacacattcttcactttgaaagaaaatttaagtttattaggaaaccatatctgtgaggagtttttattttttttttgttttctttttttgaaacagggtcttattttgttgcccaggctggagtgcagtggcatatacactgttcactgcagcctctacctcctgggccctagcagttatcctacctcagcctcccatgtagctgggaccacaggcatatgccaccaagccctgcctattttatttttttgtaaagacgtgtctcactttgttgcccaggctggtggggggaagttttagagattcattaaataatttgtgaaatttaaaataaaggaaaatattctgttttgggttttgcccagtgcatgtttggggctcataggtgaacaacatggacaaaataacctctgatatttcagtccagtagtgattcaaggactgtaacccaaatctcaaatgtaggagttttgggttacaaaacttttgggagctgagagcacaggcatcagacctgaaatggaatggacaaggaaggcctctaggaggaggaacattggaggaggttctggagagcgtggagcagtgaatctggcaaacaggagaaagagaagaggaaaaaatgtgtctgtggcacaggccagggcatgagaaggggacagtggattagaaggactgctgggattagcaacatgtaaggagggcaggagcgggaagggcagaccatggagaggctgtgaaggggagagtgggcaggtcaggaagtgacacagggccggccagcccactaaggaatgcatttgttgtgctggtagttcaaatatcagtctcgttccttgcaacagtacctccaggtcaagaagagtgaggatagcctctgtgtctgaggaggtccctgtgcattatgaggaattggttctaggaagaagggagagtgaagaggaacagagaggaccctccagatccagtacgggccaactaagggaacttggatgctcctgttcatgtccctttctccatcactgagactcgccccatcccaccctgaatgcaggttcctttcccctcggttattttgtgcgtctcagatgatgacatgtattgtaactttattctatcacatatgacttttacattatatcatagaaaaagttacttacataaattacttaatggtggattagtcatagttaaaatgttgtcagcttggtaaacaaatgaaattatcacactttagtttttcttcgttgatcatttatgaagattagtgtctcctcatttcatggatgtcacaactacatgttcttaagtaaggtgtatgcttggggtgttgtgttttccctgttaatgttggatactccagtgttcagcaaactataaacctatcaacacacatttgaaaaatccagttgttttgtgttttatttcgtgtatcctgtctttacaatattatatcttttcttctgcttacttgaaatttaatttgctcttctttttctaggttcctaagatggaaacttaggcgatcattgggcatcatcatagggtctacctgccaaatcaggtcttcttcattctgcaaaagtttctcagtcaccacttatatttcatgactttgacccttgtgaaaataccagtcagatatcttgtggaatgtcccacaatgtgtatttgtctgatggtttctcataattagactagaaacaatgtgtaaattaaacatatttttccaaattagaaaacaagaaaaacagaataacatattagttagaagtattaacatagggctggacgcagtggcttatgcctataatcccaacactttgggaggtgaaggtgggcagattaattgaatccagcaattcagcaattcaagaccaatctgggcaacatggcagaacgctgtttctaaaaaaaatgcaaaaaattagctaggtgttgcagcatatgtctgcagtctcagctactcgggaggctgaggtgggaggattgggagggtggcctgagcttgggaggtcaaggttcactgagctgtgattgtgccatagcgctccaacctgggcaagagagtgagaccatatctcaacaaaaaagagagaaaagaaaaaataacagagaaaaataatttttaaaaatcaggtaatgacaaatagggaattccaaatatattgctaatggtctgttaagcttgacagtgcttttagaaaacttgttctgtttagaatagtgttagactcacagaacaaattggtaatataaagagtttacatataccacacacagttttccttattataaatcttaacattagtgtgttacgcttgttacaattaagaaccaatgttaaacattatcattcactgctatccatgctttattcacatgtccttaatttcacttaatgtccattttttgattctggaatcccatccaggatgacacatcatatttagatgtcattcctctttatgcttcataagctgttgacacttccttcaactttcctggtctttcatgacattgacatacttcattaggaagttgtctgattttttttttttttgagatgactctcgttctgttgcccaggctggagtgcagtgacgcgatctcggcttgctgcaagctccgcctcccaggttcacgccattctcctgcctcagtctcccaagtagctgggactacaggcgcccgccaccacgcccagctaatttttcgtatttttagtggagacggggtttcaccgtgttagccaggctggtctcaatctcctgacctcgtgatctgcccacctcggcctcccaaagtgctgggattacaggcgtgagccaccgtgcccagccataggttttcaaaaggaggactacacagggaaattgccattcttatcacatcataccaatgttacatactaatagcatgtcatatcatgttgaccttaatttgattacctatttgaattacttcttatcagattcttccactgttaaattgctatttgttacacttcctgtgttgtacttttgaaaagaagtcattaggcttagtaagaagtgggaagtcattcttcacctctttatgggaagagtatctgcaaaaataatttggaatccttcaacatgtgaaatgtgtcagttttcctccatttgttttatatattttttcactcatttatttatatcaatatgcaaacatggatctttattttacacttacattttactagtttattttgttgttcaaaattttctactcttggctattggaaggtcttttaattggctactatatcattttcgtatacacactcctagtataatggcatgaatccgtttatgaggctaaagccctcaaggcctaattaccttttaacagccccaccttttaatactgctacagtggcagttagtttccactaactgtaggggacaaaaattcaaaccatagcaagaacataccaaaaccatttttaaaaacaataatgcatttatttctgcaaaaaatggccataaagggccacctttatatgtgatcatgtagatcaccctctatatgataaggaagacaaatggagaacgaattagatagagaactgttgtgaattaaagtattaggtttggaatacaactttttgggttgattgctcatatttcttagaacagaaattctcagtgtacaactttaactctgaagaaagctacccatccaatgaagaagtagcaaagtgactgtttgccatttctatcttccttctcaatagatttattgaaacatagcatatacatcacctctccacatttgttgtacttttgttatttctagttcattcttgaggtttctctttaacacagcgactattaattctagcccagttggccaggagctgtggctcacacctgtaatcccagcacttgaggttgaggtgggtggaatgcttgagctcaggagttcaagacctttgggcaacatggtgaaaccccatctctactaaaaacacaaatttagctgggtgtggtgatgggcacctgcagtcccatcaccatactcgggaggctgaggcaggagaatcacttgaacttgggaagcagaggttgcagcgagccgagattgtgccactgcactccagcctgggtgacagagcgagactccgtctcaaaaaaaaaaaaaaaattctagtgctgctcaagaagcctctagaagatttgttcatggatgtttacattgtgcctttcagggtacacttttttaaatcttattttacagccaaatacataattatctgatttgtcagtggttttattctccattgtgaaatgtaaagtaatgatgcaacctataattgatgtgaataatttattttgcaattactatttatgtcagtatcagcaaatactacattcatttgtatagatgatattaatctacaggttttatggattattagttcatttcatcctcacagcatctcaagaggtcggcactagttttactcccaatcacctagtgaatttgatctaaagccctacaagaaaggaatggatgaaacttgattttgactgagtctatctttgaagtctttacttacatcacgtgttttagaatatctttttttgtatggaaaacacattctaggaccggattaagaaatgttactctagggccaggcgcagtggctcatgcctgtaataccagcattttgggaggttgaggcaggcagatcacgtgaggtcagaagtttgagaccagcctggccaatgtggcaaaataccgtctctactaaaaatacaaaaaaattatccaggcatgctggcgggcacctgtaatcccagctactcaggaagctgaggcaggagaattgcttgaactcaggaggaggaggttgcagtgagccaagattgcaccattgcactccagcctgggcaacagagcgagaatctgtctcaaaaaaaaaaaaaaaaaaaaaaaggtattctaccccggaagtcatgttcccaaattagatgtaaatcctgtgttaaattgatttaatatttaggtctaagatccacctaggaatgattttatgtgtaatgtgaggttatagatcagattttatttttccctgtggatatatttcttgaaatatttatagaaaaattcacatttccccaattaatcttataaattatttgtgtatatatgcttgtgtctgatttgctctctcctttttttttccattggtttatttctctgtgaaaatatcacactattttagtaagacacttcatttaacacagaattttctctctagggccttctcttagccaagtgtgctattatataaagaagaaagagtgaaaacctctatgccttgaacctacaccaatattctcagttgtcccttgaataaagagcagaatttagaactcactattactgatgacacttaggtctttaatgttcttgtgaatcttagacaacccccacaacatcattccctgctttatttgcttagtccattcttggtggattttatgagatgtcaacactcctcattaggattccctccttctgaagcctttgggattttctacccacccagcaaccaccagaggtggcagaaacccctgcagacatccttcttgcgcaagcgcagttgtaccatgaatgcggtcgtcctgctgcagaccacgcccaccaagggcggggccacatccactgcagctgagctcagagccttctgtggggtctgcagtggcaaggccagccgccccctgtcttccctctggagctgtttgaggaatgcagttcttttgcataagaaaggcttttctctccagtcattctgcttgctgatcaagaacacttaacagcttcaggctttcctggtaatattcattcttgcttttgtgtttttgttttaaggtccaaatatctttaatacttgtatgcagttttcttttttataatttcacataaacatcatctaaaaccaacttcgcatgttcgcattctgtattaacaactttcgtttttgtatttaaaaatacattcataatcactttttcaaaatatcttgtcagttattttcatcttttccatgatcattctttaccagtgcaatggaaatattacttttattaggaaaagcagatgtcacgcggtttttagtgttgtcgagaaatttcctatgaaacatctctggttgaaaaggagaggaacaaaattttatgtgaggcacaagatcacatatgctcagaatcgcatgctttaataaaggctgtgattatttgcattatattgtttagcttgttctaattgtaaaaggtagacaaagaattaatttgtgtagacagaacattgcgactcccattctaaatgtagagacagtcactgcactgcgcaaataggaatgtcgtcatgttgtttgcttttctccttaccccaaaactgtagacattggctagagtctttgatttttttcccaacttgcttttgtaattgtcggcatgatgtttgcacagataaccaatgatatagatatatatttttttcttactatttgatgaatgattaatattttgggttttttttatgttttcagtgaatcaaaaatatcattcagaaaatgttgtcatccatatccaggtagcatatagttttataatctgatcttgtaataaggaaattacagtccttattgattttctgttattagttagcattttttaagttttcatgcttgtgagtatttgggaattttttttttactctgtcaataatttaacacctttgtattggtcatctgggtcgatgtctattgtttaggctcaacctttgacactcctctgaggtagtttttatgtgaatttgtaaccacccaagggattcaccttgccagctgtctagacagagccgatttatcaagacaagggaactataatagagaagcaagaattcacccagagccggctgtgcaggagaccatagttttattattactcaaatcaatctccctgtagggggatcaggggtttctaagaataatttggtgggtagggggtcggaaagtggggagtgctgattggtcatgttggagatgaaatcatagggagtggaagctgtcctcttgcgctgagtcagttccccggttggggccataagatcagatgagtcagtttattgatctgggtggtatcagctgatccatcgggagcagggcctgcaatagatctcaagcactgactgagcttaggtttcacaatagtgatgttatccccaggagcagtttgaggcagtttagagtcctgcagtctccagctggatgaatcctaaaccgtaatttttaatcttgtagctgatttgttattcctacaaaggcatgatggaggggggttgttttgggaaagggctgttactgtcttcatttaaaagctaaactataaaccgaattcctcctgaagttcgcggggaatgaacaagggcagcttggaggttagaagcaagatggagtcagttaggtcagatctctttcactgtaataattttctcagttatgattttttgcaaagatggtttcaaattgatggcttagtgtcctgggtagtgaaaatggaattcctcaacctgaattgaacatggatttcctcctgaagaaacaatttagggctccaaaaagtaaaccaggagcctggcacagtggtcacacctgtaatcccagcactttgggaggctaaggcgggtggatcataaggccaggagtttgatactagcctggacaacatggtgaaaccctgtctacttaaaaaaaaaaaatacaaaaattagccgggcatgctgatatgcacctgtaatcccagctactcgggaggctgaggcaggagaattgcttgaacttgggaggctgaggttgcagtgagtcaacatcgagccactgcactccagtctgggtgacagagaaagactctgtggggtatgatgaggcttctcttcaaatagcctgatcaatcgtttattctttaattaatagtaacccccacccccttttcctttttctcttttttctttctgcctttgttgcatgcccggacatgccacagtagcaggcttatcagtaccagctcacattcctttccttatttggaaaggagactagctctctagctcattgcagacaccccttccccttttcccctctctcccttatgtgcccaccttatctaaagaaagttcaattgtctagccaaccaggattagttcagactgtgcgacctgacctccaccaatgggaaaagggtacaggggcaggacttggggcaggaataaagactcttgtgcccctttgttctggtgtgctttcatggcgactggccaaggagaagcacccctctgcgcagaagtaaaattgctttgctaagaatcctttgtttgagtgttcaatctcccttaggattttgagcattattcccaaccattcaatccaaaaaaaaaagtagaccaggattgatttagggcctgtattataaattgtacaaatgccaacaagattgtattccactagaggaacgcattctctagtgaaggaagcattcctgcaggatgagtccctgagactcactagcaaatttcatacaagtaatgaaatcctcagtctaatggaataaaaacaattccaggggcatttgttaaagatgtataagatgtgagaaaccaacagactaacagcattgatactttatggatatttttattccaaattaatagatgtgttacaggaaaagggtcctgatccagaccccaagagagggttgccgatattcagggccagtctgcagagtaaagtgaaagcaagcttactaagaaagtaaagcagaaaaagaatggttactccatagacagagcagccctgtgggctgctggattcccattttcatggttatttattgattatatgctaaaccaagggtggattatccatgcctcccctttttagaccatataaagtaactttctgatgttgccatggcatttgtaaactgtcgtggtgctggagggatgtagcactgaggacgaccagaggtcactctcgtcaccatcatggttttggtggattttagccggcctctttactgcagcctgttttatcagcaagatctttatgacctgtatcttgtgccagtctcctgatgtgacttaaaatgccttaaccatctgggaatgcagcccagtaggtctcatcctcattttacccagccctattcaagatggagttgctctggttcacatgcctctgacagatggacatttgtttgccaagcaatgctgcaatcaggggctctggatttcagtcctccatacagagaatgtcaagggcagaccttaataaaaataaataaatgaataatcaaatttttaaaattacctctttcattcttttattgtattatgatctgacaccattaactttaattttcttgcatatggagagcaacttgatacaaactggtatttatttagtgaagaaaagagataaggtgattcccaaatttaaaggaaactggaagttttgtgggaaacaaatggaggagataagacttactagtttctacttattttaatgagaattgtgttgttcatttataaatacaaagctccatttaaattacagatgcttttgatttatgatgaggttacttccagataaacccatcacaagttaaaaatgtcatcagtcgaaaatgcattgaatatacctaacttagttaaaatcacagcctagcctatcatccttaagtgtgctcaaaacacttatattagcctaacgtttgggaagatcatccacacaaagcctattttatcataaagtgttgaatatctcatgcaatttattgaatactgtactgaaacagaaaaacagaaagattggacactcaaagtatagtttccattaatgtgtattgcttttatttaatttaaaaattttaagttgaatcatagcaagtgaggaagcccatatattataaaatgtaataagtttaccagccacaaataacaacaaatcataggaaatgcagggattgggttgaggtgaggtggttcaacctattatacccatttccttcatctctaatgggctgcccttcatccttggggttgttgcagggtggctgtgcagtgcaaagggcacacaagaattgcttgaacctgggaggtggaggttgcattgagctgagattgtgccactgcactctagcctgggcaacagagtgagaccccatctcaaaagcataaataaataaaaggataatatctctgtcaaagtacagtgatgcattgcttaatcatggaaataccttctgagaaatgcattgtttggtgatttcatctctgtgcaaacatggagagcattacacaaacctagaaggcatagcctactacacatccaggctacatggtacttactattgctcccaagctataagcctataagcatgtgactgtcctgaatactataagcaattgtaacacaatgataagtatttaaacatgtaacctatctaaacatagaaaacataaaaagatggtataaaacaaaaaatattgttcagttgtatagggcagttgccatgcctggagcttgcaggactggaagttcttctgggtgagtcagtgagtgagtggtgagtgaatgtgaagacctaggacattactgtatgctactgcagactttagaaacactgtaaactaaggctacacttaatttattaaaaactaaagtaattgtgctatggcatcgtgacagctttgacatctctaggtgataggaagttctcaggtcaattataaccttatgagagtaccctcctatatgttgtctttccttgacagaataaaatatcattttgagagccatgactaataaacacataagagtcgatttaatatttattttaaaagcccttccatagttataaaagcataagttttagtcacatcaaaatataaacaatcttgaaattaattcataagtaaatcaatagatatcttgaaattgtgcttatgatagttctaaaccagactttaatgcagaatcttggatatcttaatcgcactgtgtggcaggaagactgatggcaataaaacatttcttaaaaaagaggctgcagcattttctgtgcaatttgcaccattcctgttcacacctgttctgtaagtgttgctgcaggcgatcctgtaagaaatgacagcgggttgcagcgcaagttcatgcaaacaatgaaaagcatgtcatggctaccactaggctaacgctattgtaataaaatttgaaataaaatagactagaaatgatgaaatatgagaacaacattggaaatatttatcaagggaaccatattaatgtaagcgaattttagagaacaaaatacttttcctaggtctgcaaggacaaaactgtccagaagaacagaagagggacagatgaggtagaagcagcatggcccatgagaggggctctgcagtggattgagggtggggaggctggcaaaaaggctgggcagaatcagggctcacatcctgacctgagaacagaagagagcacaagaaacaggttcatcttcaggcacaaatcctcttcagattgaaagagagatggagtgtctagggaagtaggcaagcatttggggaaggagagtcactgattcattagtgaaacacaacaaaaaaacaaaatcttctgtgttgctgtttgtccactgcatgtgtggggctcacaggggaacaacatagacaaagtttccaaattctcaggtgtttaagacgagtgaggattcagaaaacttaacagaaactaaactgcaagtgcaagagctgcccttaggaactcaggggacaggcatcaggcctgggatgggatggacaaggggggccttcaggaggaggagcattggaggagatgctgaagagtgaggggcaggggatccaccagacaggggaggtaaagggaagaggaaacagtgtgtctggcacagttcagggcatgagataagggcagtgggttggaaggatcgctgggatgaataatatatgaggaggcaggagcaggaaggacagaccataaagggcctgagcaggggagggaggacagctctggaagtgatgcagaggctgctccctgcggactgccttctgtggggaggagttcgaatgccttttcttcttttaagtgttactcacaatccatgagatctactgacaaggaagacagttggaacaagtaagaatagtccttgtttgatgggaaggagcagtagcattaccaggaggggttggtgttggggaggggcaagggtggggaagggcagagaagtttctgtcccctcagccattttgcagatgtaggttggatcactggatcacaaattcacagtggctggctcatggccaccttgcatcacagggtgagagcagcctcacaggaaactgcagataaggggggttcccagctgcacagaagaaggacagcaggtaactttcagtcaaggttggcagggggctgcagaggtggcagcaatgatggtggtgggcagtgtgcagccttgtaggccactgtctccatggacatacagatttgcacgcatctgtgtctgcgtgtcctctcggtgtgctgacattcttacaaaatcctcatgaatttctcattgttctgagaccataacatgtattttgacttttttctaccacatgtaccctttcatgtgtacctagcaaaattgaccaaaattccttattggtggattattcatagctacagtattttccaacttaataactaaatgaattgccctgctttgtatatgtttgcctaatcattcctgaagattcatgtctcctcatttcagggggagccacccctgcatgttcataagcaggagttcagtttagggtgttctgttttcctagttaactgtggacacatctgcgttctggaaactattaaactctcaatactcatttgaaaattccagttactttatcttttacttagctttcactttatttacagtactctctcttttctcctgcttactttggatttcgtttgctctacttttaagtttcctatggaggaaatttagattatcgatttttagatgttttttcttttttaaattttatttatttatttatttttattttattattatttttttttttggagagggagtctctctctgtcgcccaggctggagtgccatggcgtgaactctgcttactgcaagctccgcctcccgggttcacactattctcctgcctcagcctcccaagtagctgggactacaggcgcccaccacaacgcccggctaattttttttgtatttttagtagagacggggtttcaccatgttagccaggatggtctcgatctcctgaccttgtgatccgcccgcctcggcctcccaaagtgctaggattacaggcaagaaccgccgctcccggcccctcttcttttctttttttttttttttttttttttggtggaattttgcttttgtcacacaggctagaatacaatggcgcaatctcggctcgctgcaacctctgcctcccgggttcaagcgattctcctgccttagcctccctagtagctgggattacaggcgcccgccaccacgcccagctaatttttgtatttttagtagaaacggggtttcgccatgttggtcaggctggtctccaactcctgacctcaggtaatctgcccacctcagcctcccaaagttctgggattacaggtgtgagccactgtgcctggccaatgtttttttttgtttgtttgctttgtttttaatagatacatttcccccctatgctccctcactgcattctacaaattttgataagatgcattttaatttaaacttagttcaaaatgttgtttaattttctcttgagatttcttgcatcatgtgttatttaaaagtgtgttagttaatctccatgtattttgaagtttaccagttatgtgccttttattgatttctatcttaattttattggggttttagggtatatatttgttaacataaaaatcatgagatctataaatttggaaagaaaaagagctataaatattcttgaaggtagccctacagcatgtatactgaacaaacatgcacgtaacctatgacccatgttcaccttggtgtggagactgagcttttttttttttttttttgagacagagtcttactctgtcccccaggctggagtgccatggtaccatcgtggctcactgcaacctctgcctcccaggttcaagcgattcacctgcctcagcctcccaaataactgggattacgggcacctgccaccatgtccagctaatttttgtatttttagtagagacagggtttcaccatgttggccaggctggtcttgaactcctgacctcaggtaatccacccgccttggcctcccaaagtgctatgattacaggtgtgagccaccacgcccagctgagacttaacatttaaatgtattacagttaggccctacacacaaaagcccctttcaggacacaaaggcagacaagtacacaatctctagaaaccagtcagacccagtccatgtttggtgggctcttatcaggagaaagttactgaaatcagtctcttgtgcaatcaaggctgtagcgatggctgttggaacagaggctggagttagcgtctggcggtggatgagctgcaaattgttttaagattgtttatgtggaagtcagtgcttgcttagctgctagagaaaaagataaacctcctgtcagttagaacatagtttattcttcaactataggggtgagtgacttaacccttgcctgtcatggccttaggtcttatttataatttgatatcttattgccaccaagaagagttcattccttcattcttatgatctctattttaatatgaatgctggtcagttgttgtgtctaaactgcaaaagagacagatgataacgaggcatgtcccacttcctgtcccatcatgactggaaactcagtttgtatggtttccctgcggtcctgtctgttcagtcagttggggggcttaggattttatttttaattctcatagaggagtgttgaagtcaccgaccgtaatagtggattcatctatttttcctgttttaacggtttctgcctcgtagttttatgttctgttgctacatgttagaattattatatcttcttggaaaattgaccccactattattatgtaatgcctttctatttccctgataatttttctgactgtatagtcagctttttctgaaattaatatagctactcctgctttttctatttgcttgctatattttgttccatctatttactttcagttaatatgtctccatttttattaaataacagataaaatgagatgtatgtactatgtataacatgaggtttgaataataatgtgcattgtggaatggctaaatccagctaattaacatgtgtattacctcacatagttatcatttttgtggagagaacactttctatccactttttaagcatttttttaaatagacacaggctctcgctctgcacctaggctggagtgcagtggtttgatcacagctcactgcagtgtagacctcctgagctcaagcaatcctcctgcctcagcttcctgagtagctgggactacaggtgcacaccaccatgcccagctaatctttagcgttttaaaaataagacttatgtttttaactagagaaaccatatggtacaatagatctcttgaaattattcctcctctctgactgaaattttgtatccatccacaaaacttctgcccaaccccaccctcaaccccaggctctggtaactaccgttctacatccccacttgtatgaaatcacattttttagatttcacatgagtaagatcttgaggtatttatctttgtatgcttaacatttcagttaacataatgtactccaggttcaaccatgttgtcgcaaatgacaggatttcctttttatatgcctcagtagtattccattggggattatatatataattttctttatctgtcaacggacacataggttgattccgtatgtttgctattgtgaacaatgttaaacacttctcattgaggagtgttgaagtcaccaactataatagtggattcatctatttttcctgttttaacaatttctgcctcatagtggtttgaacactgctaaaatatacatgagtgtaggtatctcttcaacatactgatttcattttctttggatatatagccagcgttgggattgctagatcttatggtagttctatttttaattttttgaggggcctctatacttttttcgataatggctgtaccgattaacattctcatcaacagtgtgcaggggtttcctttacaacacctgttatctttactctttttaataatagccttgtaacaggtataatatctcattttgattttaatttacatttccctgtatctgtctttatatttaaataagttttttttttttgggggggacggagtctcactctgtcgcccaggctggagtgcagtggtgtgatctcggctcactgcaagctccgcctccctggttcacgccattctcctgcctcagcctcccgagtagctgggactacaggcgcccgccaccacgctcagctaattttttgtatttttagtagagacagggtttcaccatgttagccaggatggtcccgatctcctgacctcatgatccacccgcctcggcctcccaaagtgctgggattacaggcgtgagccactgcgcccggccttaaataagttttctctagagaacatatggttaagtcttgttttttgatccactccaacagtctgtgtcttttcattggtggttttgagccattgaaagtcaatgtgattattgataatagcagattgctatctaccatgtttatttctgcttttcatttgctgcccttgttctttgttcctcctcctgtcttccatttgtttgcttccctttatggttttaattgagaatttcatatgatccaattttctcttcttagcatatcattatattttctttttatttttaaatattttagtagttgccatatgaaataaaaactttttcatattttagttgatataacagataacagtttgttaaaaacaaaaattgtagccatttatttgatgaggtattcttatgtttatagtttgagtgtgtgtgcatgtatatgggtgtgtgtgtgtatatatatatatatacacacacacatatacatatgcatgaatgctcatatataaatgcaatgaatgacagcaatagtacaaattaccaaagtacaaatgactattgtttccttattataggcaactcacactacttgtgaactgatagagtgttatttgaaagggagtttgaattaactgtaaatttagggactggctattggattaagatcctccattccttggctggctgttgtccagaggctgcattcagctccttcccatgttggcttctcccacatggcagaatgctccatcaaagctacaaggggagagtttgctagcaagacagaagtaatgattttacatagcataattacccatgtgatgtaccttcagctgtgctctattctcttgtttcaaaataagtcaaggttgctgcccacacttacagggagaggattagaatgcaaggttgtgttcaccagcaggtgggaatcactgggtgccaatctagggtctgcttgctgtgtcagatcttctccaacctgcaacagtttctcagtgttcaattattttgtataacctgaattcttttgaaaagtaccagtcaggtgttttgtggaatttcctacaaaatggattagtctcatgggtctcattattacaatagagatatgcattaatttagacacatgtatgtgggtgttaagaaaaactgaacaatgtattacttagaaatacaaaaggagagaccaggtgcaatagctcacaccggtaatcccagcactttgggaggacgaggtgggaggatcacttgaggccaggagttccagactagcctaggcaacatagccagaccctatctctaaccacaacaacaaaaatttaaaattagccaggcatggtggtgcacacctgtggtccaagctactagggaggctgaggcagcaggatgtcttgagcccgggaggtcgaggctaaagtgagccatgatcacaccacagcgctccagcctgagctacagagtgataccgtgtctcaaaaaaaatggggatatgcactcaggggttttcaacaatattgacaaggtttggcttattatactgggaagggaatttataaaaaagaaacttgttaaattttagaatagtttagatatacacagcagttgccaagataatacagatcatttccttatgcttagcatatagtttcccttattattaatcccttacattagtgggtgatatttgtcacaattcataattcagtagtatacattatccttctctatgattcacattttatttagaatttttcttctaccgaatgaacactttgtgttccaggattccctccaggagaccacatcacatttagaaatcccatctcattaggttccttctgcctgtgacagtttctcagactttccttgttattgatgacattaacatccccaatttgggatttctctgacatttttctcatgattatactggagttgggtttggggaaggaagatcactgagagaaaatgtcattgtaaccacatcatatcacgggtgtctactatcaacatgattcatgcctgttgatagcaatttgattacctggacaagttagcctttgtcaaatttctttactgtaaaattatttctttctccactttccctgtttcactttttgaaaataagtcagcatacatagcacatacttaagaacaagaaagttatgctctacctccttatgaactgaggacctaaaacaagagttgagaactctttactgtatacagttggcctgttctccaccatgatttcataccatttatttatactgtattgaatatgatatgaaattagatatattcagttcacatctcccttatactcctttatttcatagctcgaattgttccattgttggccattggaaggtctctcagttggctcccatatcattttgaaatagccacattattttggttagattttgcttgtttggtggttcaattgtaatgtttcatagtttcttactttcaggcactacagggtcctccaggccaattgtgtttatttcgtgcccaagcctggtacccatcatttcttcaagggtcctagtttcttttattggaaaatggcttttaaaacaaagatacagacccaggtatattcactgatactgggtcatctgtcgatttgaggagtagtcagctgacaaaacaatgaaacgtacctgtgtatactaacccacacatatacacatatgtgtaaatatttcctcatatgttcatatataacctgattaacttaaacataaattcctactaatgtctccagcactacatgaatataatataacttgaatcaatctccccattcccactacttggttgtaacccccactctaacagtgagtgagttggccttgttaacttaatcaccaagttagaggctacatgcatagtggcttcagaattgttcatccacactctcatgaagaacaacattaccaactaaagtacagtgctcatagacaacttcttggacctttagatgcagaatcttcactttgtacccaagttacttaggtcagttctttcccccgcctcccagcttcctttagtgaggttatatcatacatttcttattcatttttcttattttctctgtattcctctatgggatccctcaacctacaaataattattttctctgtattcctctatgggatccctcaacctacaaataattttttttttttggttttttgtttgtttgtttctttgttttttgagatagagtctcactctgtcacccagcctggagtgcaatggtgtgttcttggctcactgcagcctccgcctcccaggttccagcaattatcttgcttcagcttcccaggtagctgagattacaggcacgcaccaccacgcccggctaattatttggtatttttagcagagatggggtttcactatgttggccaagctggtctcaaatacctgacctcaggtaatccacccacctcggtctcccaagtctcccaagtgctaggattacaggcgtgagccaccatgcctggcttacaaataatatttttaatttccgtacatttaggttcactgtttgtattataaagttatgcagggtttcaaaaacaatatgatgtagcgaccatgcaggaagtttttattaccctaaagaaattccatctacttcacctatttcactgtcctccttggagagtccctagttagcattaatctgtttactatctctattattttacctttcccagggtgtcatatacatggaattgcacagtctgtcatcttttcaaactggcttccttaacttaaaaatatgcctttaattttatgaagtatatcttacggtgatttagatttgcattgctgaaggactaatgatgtcaatcatctttttatgtgccctttggggatacatattctttgaagaaatgtctatttatacaatttacccatttttagttggtatttgtcttttattttttgagatgtgacaatcttttatatattctgaacagtagaccctcattacctatatgactagcaaatattttgtctcttttttttttgagacaaagtctcgctctgttgcccaggctagagtgcagtggtgcaatcttggctcactgcaagctccgcctccccggttcacaccattctcctgcctcagcctcccaagcagctgggactacaggcgcccaccaccacgcctggctaatttttttgtacttttagcagagacggggtttcaccatgttagccaggatggtctcgatctcctgacttcatgattcgcccacctcagcctcccaaagtgctaggattacaggcgtaagccaccacgcccggccttttgtcctctttttagggttgttttatacttcttgatagtatatgttgaatgacaaacattttaaaaaatagatgaatttatctatttttgcttctgttacttgtgttttttgtgttatatcttagaaaccattaatttcagaccatgaagatacatttttaaaataactttttttttgagacatgagtatcacttttgttgcccaggttggagtgcagtggcacaatctcagctcactgcaacctctgcctcctgggttcaagtgattctcctgcctcagcctcccaagaggctaggattacaggtgcctgccaccacactaggctaattttgtatttttagtagagacagggtttcaccattttggccaggctggtctcaaactcctgacctcagatgatccacccacctaccatacccagtcaaaaatacatttttttttggaaaatatagtttaggctgggcgcagtggctcacgcctgtaatcccagcactgtgggaggccaaggcgggcggatcacctgaggttgggagttcgagaccagcctgaccaacatggagaaaccccgtctctactaacaataaaaaaattagctgagtgtgatgaaacatgcctgtaatcccacctacttggcaggctgagacagcagaatcgcttgaacctgggaagcagaggttgtggtgagctgagatcccaccattacactccagcctgggcaataagagtgaaactccgtctcgaaaaaaaaaaaaaaaaaaaaagctgggtgcggtggcttacgcctgtaatcccagcactttgtgaggctgaggcgggcggatcacactgcactccagcctgggtgacagagcgagactccgtctcaaaaaaaaaaaaaaaaaaaaaaaaatagttttcctcattgaattgccttggcaacttttgcaatccatagaccataaatgtcagggttaatctttggacagtcacttatattccattgacctatatcactgtccttatgccagtaccacaatgtcctcattactatcactttatattgtttagaaatcccataatccaactttgttctgcttctcattaccagtgtggttcttttagatctcatgaatttccatatgaattttagaatcagcttaccaattactcccgccttgcccgcaaaaaaaaagcaacagggattcccatagcacaacgacatcactctgctggacagcaagagggtgtgttcaggaaccatacctagtctacaaagccatgggactacataccacagtcccagggacaaccacaaaatcaagactcttcttttgtttttgtttcttttttttttttttgaaacggagtattgctcagtcacccaggctggagtgcaatggcacgatcccgactcactgcaacctctgcctcctgggttcaagcaattctcctgcaaatattttgtctctctttttttttgagacaaagtctcgctctgttgcccaggctagagtgcagtggtgcaatcttggctcactgcaagctccgcctccccggttcacaccattctcctgcctcagcctcccaagcagctgggaccacaagtgcccaccaccacgcctgcctaattttttgtatttttagtagagacggggtttcaccgtgttagccaggatggtctcgatctcctgacctcgtgatccacctgcctcggcctctcaaagtgctgggattacagacgtgagccaccgtgcctggccaactcttctttttatggtctgaaatcacggagtatattctctacatctcattcctaccttcaatgaggaaattagttcctgggatctgatgacctggagtgagagatgcagctgatctagaccacatttctcacttctgagatcagaatagcaaatatgtatgtactagtaatttggacatttgcaattcaagaaacctcgcacctcccacagcatacttcattcactccatgagaaaaaaacaaactcacttaaatattcatcttcagaaaaaaaaaaaaaaggctgcccgctgcggtggctcacgcctgtaatccactttgggaggccaaggctggcagatcacgaggtcaggaaatcgagattatcctggctaacacagtgaaacctcgtctctactaaaaatacaaaaaattagccgggcgtggtggcaggcgcctgtagtcccagctacttgggaggctgaggcaggagaatggcatgaacccgggaggtggagcttgcagtgagccaagatcgcaccactgcactccagcctgggtgacagagtgagactctgtctcaaaaaaaaaaaaaaaaaaaaaaaaggcagagtggcagaccaaaaacgagccatatgtcaatctggagtaggagtgaccaatgtcagagtggaaaatgagggctgatgagctttggttctcaggctttagagtaaaggtggtagatgcaaaactgtctatccaccgtgggtttatactgataagtgggcagtaaatgaaagaatagtgtaatcagctgatgttagagtgcaccttttaacaacgttcaagtacagatgcatcttaaaattgacattgtaaaaacaaagtttgccagaatctagtcataatatggctgtccttgtctgcacatgcatgaacttgatctgaaaacctttgattgacgtcttctggtgatatgatcaccatcaaaacttacagagatgctgtcagtaggttgaataatctcataaataggagagtaggactctgtcaagaaatgtgatgtcaccaaagttcctgattagcaaagatgatgacaatgtggggtaaatcatggacagggtgtgttgaaggtgattcagaagagtttgatctgagtgacaggaattttaggaatgctgttgttagtgtattctgcttatattttccatctttgtcatcatagaagtgatataagactaatacctgcatttatagtagttgaaagtttttttcagtaataatataaaattgtaagtgataagatgtatttgtcctatagtctacgaatttattcctatattgtgacataaaataatgatgcattttacaattgactcaaataataactatttcaattccttagaaaacactgtatgagaaaatgctgacttcatgtttagtatagatgtgctattagtctacaggttttaagtattattagttcattcaattctcacaacatttcaagaggtaggcaatattaccactcccaagttccagttgtgaatctgagctaaagccttacaggaaaagagtagaaaaacctgagcttgactttgtctgtctccagaatctttgtttacatcaactatgttagaatatcttttctatgataaatacatcctaagtctagtttcagaaattgtgctttacacaatagtcatgaaattatttttctcaatttcaatctaaatgctacattaaatcgtttttaagttcaggtcaatgaaccatctggtgatcattttgtatgtaatgtgaggtcaaaggtgagatttttattccctcccccaccgcaacagaagaatattcaatttcctagaacattgatagaaaaatcaattttccccccattgaactttaatatgtatgtataagagttttccactgggcatggtagctcacacctgtaatcccagcaatttaagtggctgtggtgtgaggactgcttgagcccaggagtttgagaaaggcctaggcaacatagcaaaacactgtctctacagaaataaaaattttaggccgggtgcggtagttcatgcctgtaatcccagcactttgggaggctgaggcgggcagatcacctgaggtcaggtgttcgagaccagcctggccaacatagtgaaaccccatctctaccaaaaatacaaaaactagccagacatggtggcacatgcctgcagtcctagctactcgggaggctgaggcaggagaatcgcttgaacctggcaagtggaggttgcagtgagccgagactgtgccactgcactccagcttgggcagcagagtgatactttgtctcaaaaaaaaaagaaaaaaaacaaaaaaaataaaaattttaaaaataaggagtgttcaacactctttctacttgctaacacttatgcaggttcaaatcttgccttttaatatttgtttttaatttgtcttgcagactaatgtctttatcacttgtgtacattttttttcctttggccacataagtatcatctacaacccaaaatacatttctcctttatttaaagcacaagtcaagcagacgttcaacaaataggcaataaaaatcagattaaagatactgtaggtccaggagctgtggctcatgcctttaatctcaacactttgggaagctgagatggtggatcacctgaggtcaggagtttgagaccagcctggccaacatggtgaaacgtcttctctgctaaaaatacaaaaattagctgagtgtggtggcgtgcgcctgtaatccaagctactcaggaggccgaggcaggagaatcgcttgagcccaggaggcagaggttgcagtgagctgagattgctccactgcgctccagcctgggccacagagcgagactccatctcaaaaaaaaaaaaaaaaaagatgctgtagtaggaaatgtgcattactctgttgaaatccacaaaatgcatgagcatacaacccaaatttaagtggtaattgaaggtttcctcgaagaggcagtttgtgattgaatagatgaagaataagcagctgaaaaccatgtaaattagaactaataaataacaaaggatgattagtattgaggtagagaatgggaatgtatagaatgcaaaaaaaattgagacatcgcaaggagagcagcaatttcagtacacttgaaggaagctagaaatatataccagggctagatttttaagatatttaatgccgtgtcaatgtgttggtattttataattttctgtagttccagacattagctagggtgtgctcacttaggaacacagctgttgaaattgtaaaatgagaatttgggtctcatacatttgaagaaaaaaatatatggggtttaggttcagattctgtacagacaaaggaaaagtatgggtggggaaaatgtgagacagcctgaggtccaggaaaaatggccacagaaaattttcgtattttcagataaaatctactcttcaagttagacctccctacgaaagatgctagttcaataatgaattctccacctggaaaaggacatttcagctccaagtccaggttgctttcatgccttaaagtcaccttatttgtatttcagaagcacgtgctacactagctttagggaatgaagaaccatgtgctgacagtgccatctagcatcaacagaaacaggaaccaatggcaacctaaataagtacagaaaaaaaggtggggtccaggaaccaagaatgactgctgatttgagcaggatttttacaatttgttttaaaacttaaacataatgcatagatgctgtggaattaaaaaatgcaacctaggccgggcgcggtggctgacgcctgtaatcccagcactttgggaggccaaggccggcggatcacctgaggtcaggagttcaagaccagcctggccaatatggtgaaacatctctacaaaacacacacacacacacacacacacacacacacacaaacacactagccgggcgcagtggcgcgcgcctgtaatcccagctactcgggaggttggggcaggagaatcgcttgaacccgggaggaggatgttgtggtaagccaagatcgggccactgcctggcgacagagcgaaactccgtctaaaaaagaaaaaaaatgcaatctaataatgtccagcaacgatacagggaagcctggcccatgctcacttttccagtcacctgctcttaagtagtgcacgggttaaagaacgatgtgagtgctagtggctgattctttcacttacaaacatgcatgtacacgattgtgttaccatggacaaacacataaaatttgattgtaaaactagttgactcttaactgtgacacattaaatccttgagtaaatgagtgtgtgtttccatacatatattcagtaccactacagttcacaaaatgaacgggacttcttaggttaaagccttgttaagttattctttaaaacgctttccaatctgatagagagctctggcgtattcgctcaagtttccgtggcgggtctagggctcctgaagccccacgggtctcactgctacccacatggctattaccgcaaccaccgctgccacgcagcccgcaagaaatgtgccaccgttctgagcggccgacaaacccgcagtgcgctacgggaaggtcacctgacagttggggagaacggcagcccgcaggggccgatcttcggcgcgcctgcacagcgcaggcggaattggggcgccttttctccttccggtttccgtttccgtgcgccccgagggtctgttccgcttatggcgcccgccgggagtctccctttcttcgcaagcgttaacctgcgttttactcgtaaaaatttgctttctaggcttcgtataattgttctggtcttgcactttatgtgtgcattagccttgagtttgcttgttgttttcccatgaaaaattgtattgtatttctgtaacagcccctcctcttgttacataaacattgaccagtaattgtatatccttccctctcaatattaacaattttatcttttttgcgttctttgaaaaaaacgaaatccttttcaaaaatactgaacttgtcatttttaagaaatgagatactactttaatcatttctgtattgtccttaagattctttatatattctttattgtttatcttttccactaatatacctttaatatgagaggacttgtagaggcttcagggtcacactttcgaaacccagagttttagtatctccttatagaatatttgtaatttaagaaaaattatacaaggttgaattttcaaaaatatatttttaaaatatatttaaaaaagtatttttaaatatagtcctccggaatgcaaaaggacaatactactttcagctagtactttttaagtgattattttccgccacgtattcttttgaaattatgcatttaggccgggtgcggtggctcacgcctgtaatcctagcactttgggcggccgaggcaggcagattgcctgagctcgggggttcgagaccagcctgggcaacacggtgaaacctcgtctctactaaaatacaaaagaaattacccgggggtggtggtgttcgcctgtagtcctagctactcgggaggctgaggcaggagaattgcttgaacctgggaggcggtggttgcagtgagccgagatcccgccactgcactctagcctggaggacagagtgcgattctgtctctacaaaaaaaaaagaaagaaagaaattatacatttaattgaagctcagaaaatatatgtgtgatgttttctatgaaatgaaacattgtttagatgagaaaataaatgtaaaatgcatttgccttttcaaagcagcaattagtggcgaagtgtgaatacaaaaccagtcttctttctgcagagaccatgtctgtcacccttgtgctggaatgaacaacatcacatatttttttgtttgcatatggcctgagggtcaaattctgcccagcatgtttgctttcttttttaaataaatatttattggaacacagctatgctgttcatttttgtattgccgatagctgccttaatgctacaatggcagtagttgcaagagacagaatgacccataaaaccaaaattatatactctctagccttcctatcacccactgttctgtctggtgttggggcaattcagtctttggtatgctaatttggatgagattcacacttgggctgttggagaggagtgggtgaacctgttgagttaatcagcaactccaagaggtccatttcccaagcatctttccttccataacttcacagtaattttcgtttccttatgtctcctctggccaatatttttctacttctggggtaggcggtcagaggaaagagaaaaaaaggaaaatggtgaagttggacccactgtcttggacctatgacgactcctggcagagaaaggttttcccacttttcgtttttgttcttgtgaactccctgagcagccactgtcatgacaacatgatggtctgagaggtggagtagaagagattggagaaaagggcgacagagtgagaccttgcctctaaaagaggggggtggtggtggagggatgggaggaaagggggattcttcactcttgagttccgttttcaatcctcgaacttttcctggagcccgcagtctgcaccacagcctcacttctgggtttctgcctgtcttaaattcaggcctggggataagtgagtggtaaaaattaaaattcatcaccaatttagtagtacttcacagtccagtgttattccttcatttctgttactacttagtcctcaaacagctgttccatacattttatccaagttttatagctatattcagtaggagagacagggcagaaaatactttttctttcctgaaaatggaaccctaatgggagcctgatgaattttttaattgaagccaaaataaaaaaattaatatgtgctcataaattcatatttatactcataaaatatgacattcaacccaagttcttcattttaacacttacgcctttttttttgagacagagtcttgctctgttgtccaggctggagtggaatggcatgatcttggctcactgcaacctctgtcatcagcgttcaagcaattcttgtgcctcactaccgggtcttactacattgcccaggctggtctcgaacttctgggctcaagtgatcctcccgccttggcctcccgcagtgctgtgattacaggcataaacctctacaaattttaatctacaaaaaacaaaattatattcgctttacctgtgtgacatttgaataatgacggtccatgcaggctttacatttcacttttatgaactaaaaaaaaattgagcctccacagggcaagtcctctgctgtgcatggaagataggcaggtgttcaaagcatagaaaggtactgctgccccaggtaatgcagtcaagagggaattcaagcatatggaggtgattttcattgctatcaagagtgtggtttaaaaagtcacagtaagggctggatgtggtggctcatgcctgtaatctcagcactttgggacgccaaggcaggtggatcacctgaggtcaggagttcgagaccagcctggccaacatggtgaaaccttgtctctactaaaaatacaaaaaaaaaacaatgagctgggcatgggggtggacacctgtaatcccagctacttgggaggctgaggcaggagaattgcttgaacctgggaggcagaggttgcaatgtgctgagattgtgccattgcactccagcctgggcaacaagagcgaaactccgagagagagagagagagagagagagagagggagggagggagggagggagggagggagggagagagagagagagagagagagagagagagagagaaagtcacagtaaggcaccctagcagagtgaaacaaaaactaaaaaaaaatcgtgttccagcataggcctgagcatttaaaaatcgaagaaccgtggaaatattaacaattacataaagtgcatctagattttgaagtcatttcatgcaatattcatgagttctgggtttatcagttattcctcagctttatttggtgtatcagttttaggaatgtgtatgtataatcgtcaagtcttctatctgaaaggtaccagaacaaagcctggctttaggatcagatcctgggcaggcaaaagagcgctagaggcggaacaagatatccttcctatctgaagtggccatgggttttcaactgacagccttctcctcatccacttccaccttccccgatgctctcagaggtagactatgaaggcctctccctaaccactttctagctgcctcttcatatccttagtgtatcatttctccaagctgtaggtgtcctgctaattgattttgaatttttatgttcttctgtgtgcgaatgattaaatattaaatacaaaagtcggttcatttgtttgttttttccaggcttgtaatctctaactttcatttttgctacaaagcctttaaaaaaaaaattcagttactctagattcagattttaattaaaatttatttttgaaggtaaacatcttacataaaatttggctaaaagggaagaaaaaaaactacctaaagtttatgtggtcatcctacttgcaatattttagcaagcatgatttttatttaatgagtttcaaaaattttgacaatgaatactatcacagagactaagagtgtgtgatttcttccactttcatagcacagatgctcctcgacttacaatggggttatgtccccaataaacccatcataaattgaaagtatcttaagttggccaggcacggtggcttacgcctgtaattccagcactttgggaggctgaggcaggtggatcatgaggtcaggagttcgagaccagcctgaccaacatggttaaatcctgtctctactaaaaatacaaaaattagctgggcgtggtggtgcacatctgtaatcccagctactcaggaggctgaggagaagaatcgcttgaacccaggaggcagatgttgcagtgagccgagatcataccactgcactccagcttgggcgacagagcgagactccatctcaaaaaaaaaaatatatatatatatagtgagttgaaatgcatttaatatatctaatctattgaatatcattgattggcccagccttgagcacttaaatttgctcaaaacacttacattagcctacatttgggcaaaatcatcaaacacaaagtctattttataataaagtgttgaatatctcatgtaattcataaaatactggaagtgaaaaacaatggttgtgtgaattctcaaagttcagtttctactgaatgcttatcactgtcacaccatcataaagttgaaaaattgtaagttgaaccatcttaagttggggactatctgtactgtgaaattccaacttctggacagtcaagaaggaagccagtaaaatcagaaaccagcggctttgcagccaagtaagcagggaggccaagcgtattccttggatggtctgcggtgggcagtctctgccaggatgtgcccacttagcacacacagccctgtacatcagcctgcaggaaaggcaccttggccagagcctcgggctcaccctagagcactatagaaaggtcatctggctgtctgggaggacagtagcccacaggggctgaagctgggcacacccactgggtggctcagggccagttttataatccctaccccctcaacaaacacactccactcttgaccactgcactccaacctctgtccctgcatcctccaccaggctttacacctgcaattgcactttggataataacaggcatcattggcaatatcttacactctatcatttcagataaagccttgaaaaatatgtgcaattatatctgtgcttctttgtggatatatgttttattatattcactatatgattataataatattagttactactagtatttatcaagaatgtagggctgaagctgggcacagtggctcatgcctgtaattccagcattttgggaggctgaagcaggtgtatcacttgaggtcaggaatttgagactagcctggccaacatggtgaaacctgatctctactgaaaatacaaaaattaaccgggcatttatgcctgtagtctcagctactcgggaggctgaggcacgagaattgcttgagcctgggaggtggaggttgcagtgagctgagatcgtgtcactgcactccagctgggacaacagagccccactctgtctaaaaaaaaaaaaaaaaagaatgtagggctgggcatggtggctcacgcctgtaatcccagcattttgggaggctgaagcaggaagattgcttgagctcaggagttcaagaccagcctgggcaacatggcataaccctgcctctacaaaaaaaaaaaaaaaagatctatatacacacacacaaatgccaggcatggtgacacatgcctgtggtcccaactacttgaaaggttgaggtgggaggatcgcttgagcccagaaggtcaaggctgccgtgaggcatgatggatccacggcacttcagcctgggtgaaagagcgagaccctgtctcaaaacacaaacaaacaaaaagggtgtagtatattcctggtattgattgtgcttttcatagtttaaaagtaagacttggtgtaaaggtatgcattgtgtagtataaatgcacagagaggaaaggagagattgggtacaaattcaggaaggcatgaagtgttgatgtcatgacacttagcccatccttgctctgcacagaccacgtttctcaccactgtgctggtatgtagacaccagcatgatcttctgaagcctcggataatttggtgtggatagctttcttttggattcttttaaattttgttatcttaaagctttccatagtatttcatatggataggccacagttactttccatttactattatacttttatatattttttcttattttgatatgagaaacaatgttggaataatcatgcctagacataaataagccaatttcaaaatgtttgtaggggagactcatagtgttgccagaaaaaggggccctgacccagaccccaaaagagggttcttggatctctagcaggaaggaattcaaggcgagatgcagagtgcactgaaaagagagagtttattgaaagctactcagctatagagtagagcatcctcagaaagcaagaggagaaatgccttgtatttaagttttttttatgtaagtgtcttgtctatgtaaagactaaactaagctgtgtctacgtgcagatgggttgagagcatgacaaaatttactattctgttgatttaaagaaaatggtccttgacattttagtaagtacatcaaagccataactgtaagtaacttgaaagcatatattgttatgggtattgggacatctggattttgtgttgttgtaggagtgtatccttgcaccggtagcctaggtattgttaagctgtttcctcaattataaacatgactatgggttgtgaccagcaaggaatgtgccttagttaatctcaagatggagctgaacttaaaatgccattactttggctctaaccagctcctgcttccataacagtggggtcaaaaggtgttcctttaaaatcttcctagacactgccaaattgcttttggaaacttctcacctggtgagatggcatgagtatctttggctcatttttctacatagacttggaaacagttttatgtttataaaatatgtatcacctcatttataaatttgtttgaataatttaaccattttgcttttattagctattttgctactctctgttttccttgcctgagtctttcccacatctctgcaacattgtatcatttcccacacctaaaaccaaagagggacaggcaagccagtggagagagcagaggctgatgagaacgaaggattttccaggaaggaatctggggctgtgtgtgtgtgtgtgtgtgtgtgtgtgtgtgtgtgtatgtctgggtgtgtgaatattgtttttattagcctgtagcccacgtgttgcatggccatatttttactatcaggatataaaacacacttacacacagctgcatacaaatgcaatgagtttatttttcatatacatttcaaaataatagcgtgaacagaccagaactcttcttcaaagttcaagaatgtcctcatggatccagcatccgtctggtttctgtttctgcattctcagtacatagcctcacttctctttctccaattttggaggatgtgtaaaaaattttattcttaaccaaacattagtcaggctccggaacgttctcttaactccatccatgcactttcttgtaaaatgcagttttaacaagaacactgctaagttagtttagcaagacccccacaccttagacatctgatcaccttctatatcttatcaggttcctcatcctccaccatcccttaagtgatcatcccagcttgtcttcagcaagaatcctattagatcaatttagccagaatccctcttgcccctgatgttaattcttagtaattttccaaccactagtccccaccctgttccttggctataaattgccacttgcccatgctgtacttagagttacttagagttgagtctcactctctcccacactgcaaggccccattacggcggtccctaaatctattgcagtggtcccgaataaagtcttccttactatgcattaacacgtatcattgaatatgactttttctttaacagatactttgacgaaggtaattgggactcccatcaagtctccacacagctagcagccacgtggggcacttctccaggtaaggattgtccctgttccacttatgttcctgtcagtaaaatggtaggttcagtgtcaggctttaccattttcttcagggagagacccatctgatatttagtcagccatcagatgggtccagccatagcacacattagctgtgacatgacgtcgtttatgacaatgactttgagcagagttgcacacctaaaaagggactcaattaaaattatcattcattttagttatttctcagatgcatttattatttccattttccaaaactcctaatgttacatttcttcttcacatgttagatatgaacaaagtaagactaactgtggccacatcctctttacttaggaccctacccaaagtggcaggaatgggatgtaaagtgacataatcagacacagtcaaactggcttttaatcgttaagtatcattgtcatctcaaagcacttggcatagttactgaccccttaaatgtcctttctccatcttatcttctcctttgttctctgtatcatcttccggtcctatagaaatatatccccacgagcacacactgaggtctttttttttttttttttttgagacggagtcttgctctgttgcccagactggagtgcagtggcatgatctcagctcactgcaacctctgcctctcgagttcaagcgattctcctgcctcaggctcccatgtagctgggattacaggcatgcgccaccatgcctggctaatttttgtatttttagtagagacaaggtttcaccatgttggccaggctgctctcaaactcctgacctcaggttatcctccggcctcggcctcccaaagtgctgggattaccagcatgagccatcgcacctggcctcactgaggtcttaatgctgagttgaactttgtctctggccatgagcatcagtccatgtattataataggtttgggttgggtgtggtggctcacacctgtaatcccagcactttgggaggccgaggcaggctcacaggtaaacaatttagacaaagttttcacattctctgagatttgtatacattggagattcagaaaaatgtaaccgaaaattaaactataggtggaatagctgcctttgggggctgagaagacaggcatcagacctgggatagacaagggaggcctcttgttccttgaaatgataccccagcccatgaggtctgcatgccaggaagccaaatgagtgaggatggtctgtgtccgctggggaggtccctggatgttgccaagagggatagggtctgggaaagagtgaggatggagtcaggcagagaggaccccccaggctcatggatggactgacctgaggacttatattaagtcataggacagtagagaaagtaagagccaagcataatgtaatcctaacaatgtaaaaagtattaatcattttattattagttaatgtcactgaactgtacacttaaaatggctaaaaaggtaaattttaggttacatatattttaccgtaatataaaatgacaaatatattagaaatgacttttttttttttttgagatgtagtcttgctctgttgcccgggctagaatgcagtggcacaatctcggctcaccacaacctccgcctcccaggttcaagtgattctcctgcctcagcctcccaaatagctgggattacaggtgtccgccaccatgtccaactaatttttgtatttttagtagagacaggtttcactgtcttggccaggctggtctcgaactccagacctcgtgatccacccacctcgggttcccaaagtgctgagattacaggcgtgacccaccacgcctggccaggaatgactgtcaactatattttcttaacatatgtattcctacacaacatcagttttgtaatagtttatttttgttttgttttgcaatttttttcttttattgtaaggaaagaagtacattttttcagcgtgtaagaatgcaaaagtaattatcagatgtttgtcacatcttaacaaaataggaccttattttcctagatgttgctgcattcagtccctttcttggtatggtaaaagcatcaatcagccagggaggcaactataaatacagaagagcagtttcctacagatagtcaaccatgctacccctcttactgacttaattttaatattggagcctggcacaattaacctagtttcctcgtaaacacaagaacaacgtactgcaatcaatgtaggcatatacaggctcttaaagttctgagaagcagcaagtaagttcatcatttactaagatccttgacattcttctgtttctgtgaaatttatgcatctgtgagaagtttcttttctttttttatttttttttgagacagagtctcgctctgtcacccaggctggagtgctgtggcacaatcttggctcactgcaacctgaacctctggggttcatgccattctcttgcctcagcctcccgagtagctggaactacaggcacacgccaccacacctggctaatttttatatttttaatagagacagggtttcaccatgttggccaggctggtctcgaactcctgacctcaggtgatccacccaccttggccttccaaagtgctgggattacaggcgtgagccaccgtgcccagctgagaagtttcttatactagaagaaaaagaaaatttgatttattttaaaatataatggtttagtctgtagcaagtaatattaatttttttatttttttatttttgagacggagtctcattctgtcacccagactggagttcaatggcacgatctccgctcactgcaagctccgcctcccgggttcaggccattctcttgcctcagcctcctgagtagctgggactacaggcgcctgccaccacgcccagctaatttttttttgtatttttagtagagacagggtttcaccgtgttagccaggatggtcttgatctcctgacctcgtgattcacccgcctcggcctcccaaagtgctgggattacaggcatgagccaccgtgcccggccctaacacgaattcttaagagaggtgaaccagggatgggattgtggatcaatcatgcaaagaccgactcctctgggcttcatttcctccatactgaatgtgcatccctacatgttcatgttgttgtttcataggtagtgcagggggtcagaataggatacccctggctgggtgtggtggctcacgcctgtaatctcagcactttgggaggccaaggcaggtggatcacctcagatcaggagtttgaaaccagcctggccaacatggtgaaaccccttctctactaaaaatacaaaaattagccgggtgtggtggtacacgcttgtagtcccagctactcaggagactgaggcaggagaatggcttgaacccgagaggcagaggttgcagtgagctgagatcgcacctctgcactccagcctaggtgagattgaaactccatttcaaaaaaaaaaaaaaaaaaaggatatcctcaattgcggtgccctggcatactgagtattttaagctgaaggaaattgagaaaaccatggaagcaggaaggccactctctgatttgctcccacttttctcccctgaagcaggtcataaaagaattatctgccctacctgtcctgaaagtaggtcataatgggaccctcatttcagaggagttctgccctatccctggataccaacaaagatctgaacaaacaggtcttatgaatttctccccaggtaattactattagatgataccctttgttccccaaagctatttcttcaaaactgtccataaaaatacacctatccagctgggcacagtggctcacacctgtaatcccagtactttgggaggctgaggcgggtggatcacgaggtcaggagttcaagacaagcctgaccaacatggtgaaaccccacctctactaaaaatacaaaaaacaactagctgggtgtggtggcacaagcctgtagtcccagctactcaggaggctgaggcaggagaatcgcttgaacccaggaggtggaggttgcagtgagccgagatcgcgccattgcactccagcctgggcaacagagcgagactctgtctcaaaaaacaaaaacaaaaacaaaaaaacaaaaaagccccacctatcccttggcctttgcatcttgatttctgaagactcacatgtcatgtaaaacttacgttaagtaaatatattatgtttttctcttgtaaatctgtcttttgtaatcaggatctcagccatgatgcattttggcttgtcagaaataatcacaacatgtggagaaatagataaaatgccatttttaaaattattattattttttatttttttgatagagtctcgttctatcgcccaggctgcagtgcagtgtcatgatctcagctcactgcaacctccaccacccaggtccaatcagttcttgtgactcagcctccccagtagctgtgatttcaggcatgcaccaccacgcttggctaatgtttgtatttttagtagagatgggatcttgctatgttggccaggctagcctgaaactcctggcctcaagtgatctgcccgccttcgcctccttaaatgctgggaatacagttgtgtaatggtatttttttttgagacaaggtctcaaaatggcattttttttgagacagggttgttgctctatttaccaaagactatacaagattatgtgaacttaaaataatattcgggttaatttctgtatttctaagttttaggaatacttagttatgtaagcatttacttccctttaagtcaattaaatcctcttttaaggaactttataaattaatttggtagtatcattgggcccagtagagttttttttttcttttttttgagacggattctcgctgtgttgcccaggctggagtgcaatggcgcaatctcagctcactgcaacttctgcctcctgggttcaagcgattctcctgcctcaccctcccaagtagctgggattgtaggctcccgccaccatgtccagctaatttttgtatttttagtagaaatggtgtttcaccatgttgatcaggctggtttccaactcctgacctcaggttatccaccctcctcggcctcccaaagtgttgggattacagggatgagccaccacacccggcaaatttcttttaagatattttataaattaatttggtaataccatcagaggcagaaaaatttcacacagatggagagacatacataaacatacaggcaaatatcaaaagagatcttctagctatcattctaaaatcttagccatgaatcagaaacacatagtaatacaaagtcactgttttatatgtaacagttatctctcatattttctccatttcatattttttccctattgtccctggtaaatgggacaagttaaggctatgtactaaatattaggcctaatgctttttaccaatattcatggagaaggtttttaagatcttcatttgccctgtgaagcccttttgaaggctgtggactaaatgttaaatgagtcactgcaaagacatctaacagctatcgaaatgtctccaccacccatctgagtggataaaatatccagtctatttccaaatagtctttttttcctcttcagccttggtacttacttttggaggactctgagtcccttgacagcagggtggactaaagtttaagagaagaagtctgacaggggaggaagacagagagatggagaaggtaggagtttgaagggatcatatccaggactcaaaggaactgaatggaagattgaaagtggcaagagtaggaaggaggaacagaaagagggggaaggaagaggtcttaagggaaccagctgggggagatattaaattccccaaagaggctagtgaagctccaaattatccttagcaaaatcaggccgggtgtggtggatcacttgaggtcaggagtttgagaccagcctggccaacatggtgaaaccctatctctactaaaaatacaaaaattagttgggtgtggtggcacatgcctgtaatcccagctactcgggaggctgaggcaggagaatcgcttgaacctgggaggtggaagctgcagtaagccaagatagcaccactgtacttcagtctgggtggcagagtgagactccatctcaacaaataaataaataaataaataaatatccttagcaaaatcatgccaaaaagagggaggtaggcagaattgtgaaagcttatagccaacagaggttcaagaaaaggctttttgtcaatggataagtttacatgggaagatccggatcaaaaggagagaacagagaggacttaagaaaattgttcctattggctgggtgtggtggcttatgcctgtaatcccagcactttgggaggctgaggcaggcggatcacctaaggtcaggagttcaagaccagcctgatcaacatggtgaaaccccgtctctactaaaaatacaaaaattagctgggcatggaggtgcacgtctgtaatcccagttattcggaggctgaggcaggagaattgcttgaatctgggaggcagaggttgcagtgagccgaaatcgagccactgcactccagcctgggtgacagagtgagactctgtctcaaaacaaacaaacaaacaaacaaacaaaaacagaaaagaagaaaagaaagtttttcctataagtctgtaactatcagcttcccattaggccaactattgatcatagaggtcttaaaaaatcctttcaggctgggtgccgtggctcatgcctgtaatcccagcacattgggaacctaaggcggtaggattggttgagcccaggagttccacaccagcctgggcaacgtattgagacctcatctttactaaaaataaacaaaattagctgggtgtggtggcatgctcctgtagtcccagctactcgggaggctgaggtgagaggatcacctgagcccaggaggtcaaggctgcagtgagctgtgattgtgccactacactccagcctgggtgacagagcaagacactgtctcaaatatatataatttttttcaaatatcttatcaggttttggtcaagaggaaaggtaaatattcctgatagtacattcccattaaaaaaaaatgtacccgttacaagtgacttggaaccaaaatccatagattctttcatggttctttatcggtatggtgatagggttttcatattcatgtgtgagatgtgcctccctcagtccttgttatgacatcattacgtgtctgacatgacaaaaaggaaaagagaaaaaggtggagaaaggtaaaaaataggaaaagaaaaactgaaggaaaaaggaaaaaaacccaatccgtaagccttttatgacttacccatgaatgcagaggcatcttcaaagagggtgcaaaaaatgcagccctctaaagatgccaaaccactctcaaagatagccaaaagaaaggcaggcctagatactccccctgagagctggcaatagatgttagctgcaaatgggttgcaacccacatgtctgtccagctgtattcccacagccccccaacctgatggttggctgcttgcacacacaagaaccaacaacttgtacgccccatcaagtggaaaaccaagccaaattcttttttttttttttcctttgagacggagtctcgctctgtcgcccaggctggagcgcagtggtgtgatctcggctcactgcaagctctgcctcccaggttcacgccattctcccgcctcagcctcccaagtagctgggactacaggtgcccgccaccacgcctggctaattttttgtatttttagtagagacgggctttcaccatgttagccaggatgtgtcttgatctcctgacctcgtgatccgcccgcctcggcctcccaaagtgctgggattacaggcgtgagccaccgtgcccagccgaaacaaagccaaattcttgacacaaaatgacagaaacagaaaagcaatagctgctcctgggagggaaaggatcaataaccaataggcaccacaaaatcaagctacagtcacaatctagataatgaatttttataatttttttcctatccatctgcattgggaaaataagggacaaggagtttttactttcttctcttgaccaggaactactgacagagatctgggagagctgactttggtgaaaattctcaccttgcacaggcttgtgtctgttttccagaatcctacctgcagactccagaatgaagtgtcccagctgtccctttctcgttgccagaaacttctacccttctcattcctttgcttgtccccctgtaacaagagacagattaatgagagaaaatcatgcaagttgatttactgtatgttttatgtaacatgagtcttcataagaaaactaagcccaaaagaagcagttaaacctgagtgttttttttgctggtctgatgaagagcgaagagtcatggagaaatgtaatgggaccaaaaggtgtcagctaagtgtaataaactgggggaaacagcaagggctattccttcagattcctctcagtgtccctgtgtcttcagagataaagatcttttcctctgggtaaagcgtggcagctctcacatgagggttttattacttgcttcagcagaaagtcaaaaagcccttcccaggttttatgacctctttcagcgaaaggtgagaaagtccttcctacacatttggtttctgaaattccttcagcttaaaatattcattatgccaactttccatattttgggttggcatgtcctgaatatattgtcagagcattacagaaaaaatacacccaaacacacacacacacacacacacacacacacacacacacacggacaacacattccctatgactatcttaaaattgattaacctcaaacatttaattttggatgactgagtcaaaaagagaattgaaattgccatcacatatctggtcaagctgaaagatggcatttggtattggaaattgatggctgctggtcatttaacacccatgcctcagttacatatctggctcatgagataagaatgctaaacagtataaacaagacacctcagtatgaaaacgttctgccgttacaaaggtactctctttgtgttactctgcattctctcccagccctgtagcaatttatcctttgtccatatattgaagatagatttgtttacatctactcttagccttcctgaatatcctttgctccaggagagccttaagccaagggtagaaatgacaagacagactctatgtttgcagaacaccacatagtcacagcgatgcaaatggaaaggaaaatatgagaacaaggtctttcaatccagatttggcctatgtttgtattaaaggtgttattcccatgtaagaccttaagacataatattaataataattcagctatgaaaggttcatgttgagttctacttgcatgggcaagctattaggtagaagttaaagatgcacagaacacattagttctttctaggtatatccttagcagagcaaaattgcaacccaagttagaacaggaaaaacttgatgaagcatgaaattaccagctggtctgatgggagatatgatgtggccctgaggtacagtaggtggtgcctgaagcatggtgacagtagtggaaacaccttagggtgacccacaattagtcactctcattcaattccctttccttgggtgtgggaagaacctgccaatagcatgtggcaaaggatatcgttactgtgtttatgctatgttatatgtcaaaagtgaagatatagtgcagatgtaattaaagaaatcagttggctttgagttcattaaaaggcagaatagcctatgtagacctccccttatcagatgagccacttaaaatggctcctaggcagatcacaaggtcaggagatcgagacccccccgccggctaacacggtgaaacctcatctctactaaaaatacaaaaaaactagctaggtgtggtggcgggcgcctgtagttccagctactcgggagactgaggcaggagaatggtgtaaacctgggaggcggagcttgcagtgagccgagatcgtgccactgcactccagcctgggcaacagagcgagactccgtctaaaaaaaaaatggctcctaggccttccctgatgtcagggaaaatagaaaagactctgtctcttcactgttgcctttgaagaagcaagctgccatgaattctatagccattgtaaaatgaattctgccaacaagcaaatgagcttaaaaagtaacagagtctgcgcacagtggttcacgcctgtaatcccatcactttgggaggctgaggtgggtagactgcttgagcccaggagtttgagaccagcctgggcaacatggtaaaacttcatctctatagtaaaatacaaaaattacccgggcacagtggcatgcacctgtagtcctagctgctcaggaggctgaggtgaaaggatggtttgggtccaggaggcagaggttgcagtgagtcaaaatcacccctctgcactccagcctgagtgagagccagactctatctaaaataaacaaaaacaaaaacaaaaacgtaatacaggccactgacaccttgactgaatccctgtgaaatatttcacctgaaaatccagctaacctgtgcccactgacccacaggaatggagataatatatttacattgttgtaaactgctaaattgactggatgtggtggctcacacctgtaatcccagcatcttgggaaaccaaggtggggggaatcacttgaggccaggagtttgagactagcctgagcaacgtagcaagaccctgtctctacaaaattaaaaaattagccgagtgtggtggtgtgtgcttgtagtcctagctattctggaggttgaatgggaagatttctttagcccaggagttcgtggttacagtgagctatgatcacaccactgcactccagaatggatgacaacgtgagaccttgtgatatggtttggctgtgtctccacccaaatctcaccttgaattataatcccatgtgtcaagggtggggccaggtggagataattgaaacatggggggtggtttcccctatactgttctcttggtcatgaataagtctcattagatctgatgcttttataaatgggagttcccctgcacaagcgctcttgcctgccaccatgtaacatgtgcctttgcttctcctttgctttcctccatgatggtgagggcttcctagccatgtggaactgtgagtccatgaaacctctttctttataaattacccagtctcagatatgtctttattagcaggctgagaatcaactaatacaccctgtattaatgtattaatacatgaataaaaaaagttgctaaatatgtagaactacactctgtgtcttccctttagtgttaggaagatcaaataggcactacaagagcattttcttggtaaatggtatctaaattccctcttatcaatggcaattactcatttggactgctaacaccataggggcaaaaatcctgacatgtatgaatcttgtgggagaagcacttggaaaaaaaacaaaaacaaaaacaaaaaacagagacaaacatttctgagcaaaaatgcaagctttttaaaaaaaatagtttgttttgatcagttcacatcatgtaggtcatttcatccggcctcattggcatataagtagtatatattgagctaggcgtggtggcttacgcctgtaatcgcagcactttgggaggccgaggcaggcggatcacgaggtgaagagatcgagaccatcctggccaacatggtaaaaccccgtctctactaaaaatacaaaaattagctgggcatggtggcgggctcctgtagtcccagctactcgggagagtgaggcaggagaatcacttgaacccgggaggcagaggttgcaatgagcgaagatcgcaccactgcaccccatcctggcgacagagtgagatctgtctaaaaaaaaaaaaagtagtatatattgaaagtataaaggggtgaaccactttgaattgcgtatgacaaaagaagctcagagttcaggtgaaaaatgtgttattacaaactcaactatcaatttaatctgtctttaatgtatgagtcaaaattaagtgttttctgttggggtgatcggacccaacaccaggccgtgggggcgatgaagtcccacggagtcaaaggaatgagaaaagacaagttaagagagaaactgggaccaggggccaatgctagtatggaggctgcgaaggccccaagctctgggaccccatgctatttattggtgatcaaacaaagaaacaggtggcgaggctgtgggggttgaaaggaagtggtgtatcaagcaaatgagctacagctgtgatggtttagcattttctttgaaacatatggctacttgagataatgggagtgctagaagcaaggagccagcaagtctagacacattccaaaggccacaaggggttttagaccctggaccccagacacgttccaagactcttttacattatgtcagacatccaggccctgcctcaaattctctcccaacactcagcttttctcccaacactttctattacaaacatcaacggaaaaatcaatgatctgtttaaaatattgtaaataccatcactatgtttgaagatatgttttaattttttattattcctttaattaaaagaactgtatgccaattaataagctgttgccttttagatcaaaattaatcattcattgcctgctctgtgaaaattgagtcagatacccttaaaaatatattgtgttgcaatagtaagttttttcagtaattgaaggtggttggacattgtaaaaagagattttcctttctgattccactgtggtctctcagccgtttcccatagcatgcatgcctttctccagcactatatttctacagtatgcatgagcaatcctgcagcaacaatggcttttctagcatcaggctcctacaacgcatgacagtcagcagcactagtggtcagccacttcctatatcccctacccttaggtggtttctagtgtagtgcttccaataatatacctacctgtgaacacctttccctggcacctaagtgggaagatttctggaaagttccactggtgccgcacactgtgactattctgtgtagcctctaacaagctctggattgcaatccacttatagtaaataaatgtccacttcaaacattccctcctcaaattcttgtgttttgtctgcctcctgattggaccctcactgaaagaattaatgctggcattgttccaagagatatttccacagagatgaatctgggaggttgtgttggtcattcctttatgtttgggcacattccacagctccttgtcaatgtgcaatgggatactagcaacctatgacatgcagtggtatcacaattaatcaagcaatgacctgtggttgattgtggcaaagtgccaactgaaacacgtgccttgggagcccgagtgactgctgcactgaatgttatggcagtcaagataactgtaaggactgtggggtggaatggattcagttgagggtccttgagtgattacgaacagaaaataacaagcttaggttccttaattctcagttcaagccacggtttgaaaacctgagaacttccatggcgactataaaggaaattcatttgttgtagctgcagggctgatattgttaaatatcaaaaccaagaatgagatcctgaaacttggaatgggtcaggaaacttggaatgggggaatctgtttagactcagttgaaactgaccatctggaaacagaaagtcaggctgagcctttcttaccagtttaagtagcttgtctctattgtttgaagaaaatatctttcccttgcacaaaagctgggttagataccattaaaggggatgcccatttttcttaaagtcccctacaaatcatcactttttgctagtagcatgactagaccccataactaggattgaatagcaacctattcctaagggataggtacacactatgacctgtaggaaacagctacatgcaaaaggaactgtgacatatattggaagaaacctggggaatgttggaagagcattctaaggccgttatactaaggaggacaaaatataacagtagattgggttaattaatctcagtgctattactggggattcaagatttattgtgctgcaggcatgtggctcacacctataatcccagcactttggatgccaaggcaggaggataagatgagtccataaatttaagaccggtttgggcaacataaagagaccttgtatctacaaaaaataaataaataaataatccagtgagagtggtgcacctgtagtcccagctacttgggggctgagatcagaggatcacttgagccctggaggttgagggtgcagtgagctgtgatcatgcaactgcagtccagcctgggcaacagagccagaccctgtctcaaaaaattaacaaaaaaagatttattttgtagttctcctggtagagatctttcatctccttggttagatgtattccttggtattgccgtcttaggtagaggaagagggctcaaacatcttgcttatgtgataactttgccaaagacacaatgtacaatttgttttaaaggccagtgagggatgtaccagtaatcagaatgttttggcaaacagaagactttggtggtagctaactgatcacagggtccctagaatgaaatagatgagaagcatacttagagtattgtttgatctctatatcaagaaaagttccgggtctggtagtcaaatgttcaacagatgcctacctagctttcaaccctaagtcaattcacagttgcagagtgataccacacggaccatgaaaagaacacttgtttgtatgactgagacaaaaaagaatgtcatcgtgttctaccttacctgggaatatgctcaattggtgacaaaattgttgccactctgtgcatgaccacaaaagtaccgcaggtattgattttgaagttacacataaactttagtgagtgggcatatttgcaaatatgtaacctgagaataatgaagattaactatctttaaacaacataaggagtcaacatcagtttctgaagtaaaataatgactaagttaaattttcaagggcaaattcagattccaagtgcacagaacataggaagaaaaggacatgcaaatcagaaaaattcacaagtgtaatgaggcgagaagggacatggcgcaccaattacaaaggaatcagaatgatctgttcatagagttgtaaatggggttgtggaggaagaaatgaggatgaacagataggcaagacaagttcttttccttctatgtaaataagagaaactgagaaattgtaacgtaagacaagatctaatattatttttggacttcagaatggtattgcataaatgcttaattgttcctgatttcgggaggggaaaatggaaatagcatttccgttgcatttttgtgaacaaaatttgagtgatcatgttctttgttgcatgtggtagatggagaggtgaatgaaagattcagctttcttcctgtacttgaggcatctgtgaattgggaattcagacaaacagataagcaactaattctggatataaaatttgtgatttaggctatgcattctactggggaatttcagatgtataggaatgtagttgaaatttaagtggtcagggaatgctatctagaggaagaaaattatgactagagacaagaataaatagtagtaacttaaaaaaatatatatcagggaagaaaaaatggatttttgttccaggaaagaaactaagtatgaacagatgatgaactatttcaggaactgtgtctgcaattcgttccttccagtgggttcttggtcttgctgacttcaagaatgaagccgtgcaccctggcagtgagtgttacagttcttaaagatggtgtgtccagagtttgttccttcagatgctcagatgtgtccagagtttcttccttctggtgggttcgtggtcttgctgacttcaggagtgaagccacagaccttcgcagtcagtgttacagctctcagtccggagttgttccttcctccaggtgggttcatggtctcgccggcttcaggagtgaagctgcagacctttgcggtgttacaagcgttacaagctcgtaaaggtagtgtggacccaaagagtgagcagcagcaagatttattgcaaagagcaaaagaacaatgcttccacagcgtggaaagggaccccagtgggttgccactgctggctccggtggccagcttttattcccttatttggccctgcccatgtcctgctgattggttcattttacagagtgctgactggtccatttttacagagtgctgattggtgcgtttacaaacctttagctagacacagagcactgattgttgtgtttacaatcctttaggtagacagaaaagttttccaagtccccacccaacccagaagcccagctggcttcacctctcagaaccacagatacaaattattttatttacctgaatcaatctgaaagcatatgctggggctggatgttgaggatacttaatggcacattaattctttgattttgtatatgtttagatacattcattagctacagtttgcagcttcctaacagggattccacagatatgactgtaaattgagaattttggtttcccagtgtctgaaaagtggttaacccaaagttttggctttagagaaagagtctatacaggcaaaagcgtagagggtttggcagagaaaaaacaaaaacaaaaacaaaacatcctaagggccaaaggaaatggttgcaaggaaaacggtcaaaaacttgcatcattctcttcatccactcacaccactctatgcaggatcccaaatcagtccttgaatgtttcggcacaggttccattcatgctttccaatggaaacttcatttggtttataggattcaggattgtggaaccatccggtatcaagaaaataaaaggccatgaaaaagtttacagaatgttggtataagcagctgctagggatattactgagttttaatgggagagatagtcccagaaagctggaagaagaaagatcagggccaagcgcggtggctcacacttgtaatcccatcactttggaggcagagaggggcggatcacttgagtccaggagttcgagaccagcttgggcaatgtggataaaccccatctctacaaaaacatacaaaaaattgctgtgtgtggtggtgcacgcctgtggtcccaggtatttgggagactgaggtgggaagatcacctgagcccaggaggtggcagttgcagtgagcagagctgaggtctggccactgcattccagcctgggctacaaagcaaagtcctgtctcaaaaaaaaaaaaaagatcggagcaagaaaaaggaaaaagatgggtaaaaacatagaaacgactaagttcatttcagcaggaatatatttttaaatatatttcaaaactgaaacaatgctatgttttgctgcagtgtgtgagggaacacaattcaggctaatgcacagtaaaaatgcagggaagcctggccccgtaaccacttttaataccacatactacagttaacagttggtgagaaccctattaggctgatttcaattacaaacatggatgtacaggagtatgttttaatggcacacatgcatagttcatattttattagaaaatctgttcaggccggctacagtggctaacgcctgtaatcctagcactttggaaggctgaggcgggtggatcacctgaggttaggagctcaagaccggcctggccaacatggtgaaaccccgtctctactaaaaatacaaaaattagctaggcatggtgccgcgcgcctgtaatcccagctactcaggaggctgaagcaggagaatcgcatgaacccgggaggcagaggttgcagtgagccaagatcgggccactgcactccagcctgggcaacagagcaagactccctcttgggaaaaagaaaagaaaagaaaagaaagaaagaaaatccgggctgggcacagtggctcacttctgtaatcccaacattttgggaggatcacttgagatcaggagttcaagactagccttgccaacatggtgaaaccttgtctctactaaaaatacaaaaattagctgggcatcagctactcttgaggctgaggcaggagaaaggcgtgaacccgggaagtggagcttgcagtgagccgagatcgcgccactgcactccagcctgggcaacagggcaagactccgtctcaaaaaaaaaaaaaaaaaaaaattagctgggcgtggtggcatgtgcctgtaatcctagctacttgggaggctgaggcaggagaatcgcttgaacccagaattcagaggttgcagtaaactgagatcctgccactgcactccaggctgggtgagagagcaagactccgtctcaaaaaaaaaaaaaaaaaattaaaaattaaatccaccaaattagctcaagaacacttccttgactggctcagaaatcccatccgattttaagatagatgttaaaaaataacagggaggaccgggtgcggtggctcagacctgtaaacccagcactttgggaggccgaggtggggggattatgaggtcagcagttcgagaccagcctggccaatatggtaaaaccctgtctctactaaatatacaaaaattaactgggcatggtggcgtgcgcctgtagtcttagcagctcaggaggctgaggcaggagagtcgcttgaacccgggaggcggaggtggcagtgagccgagatcaagccactgcactcgagcctgggtgacagagtgagactccatctcaaaaaaaaaaaaaaaaagacacattatttcattttaataatgttagtcaattttttttgttgtcgatgagttgcgttttgttcattaagaatcagctgtaacatttgttgggacttggtagaagataactgctaggtggttgtagctgccaggcttttaatgagaggagcttagtttagcgaaaataaaagaaaaacaaagattaatatttggaataaactgtaaactcagcttctgagtccagagatcagccagtcaagattgtttagacttgagcttatctttagatggtgaagttaggaaggtagtgacagtctaatgagttttcctagtttacagtttgtatgtctttggtgattacatccagtgttctggtgaacttcctgaggggcccacccagcaacagacacaaaggtgatttatttgaaactgtaggaacgaaaaagtaatatattttcatcacccattacaaggttaacgagtgagactcctataacaaaagacatattaataagaaaaaataatatcaaatgtagttactaaaagtattatgtgacatgggagcttttagaaatgaagatcaaaagaaccagggagaatcctgggtttttttgtttttgtttttgtttttaattgagacaaggtctggctttgtcaccctggctggagttcagtgacacgatcccaggtcacttcaacctccacctccatgggctcaagccatattccacctcagcctcccgagtagctgggactacaggtgggtgccactgcacctggctaatttttgttttgttttgtttttgtagagatggggttttgccttgttgcccaggctggtcttgagctcccaagctcaactgattcacccaccttgacctcccaaagtgctgggattacagacatgagccaccgtacatggctggaaaaatctatttttacagagagctatgcaaatgtgtgattggaaaacaaatgggtatgacctagtggcaataatctgaggagaaattagccagatctgttcagattcttcttggtctctgcgtatagaaaaggactgctcctgagtgaggaatttatgacctactttccggggaggtaggtcagagaattcttttgtgacccacttcagggggaagaggtcaaagactgtgcttcctgcatctattatctcaatttctgaggtgccatatttgggggcattatttacagagactcaagggggtgtaagtgcctattatcagaggtcattcttacggaggctattaacgaaattttaggtgaatggctgagcagacatctagaagttgtcatccagtctatttctaattaggttttttcttttctgacgcaggtagttgattttgcaggatctgctgtcccttaggagaagagggccctaaagttcaagtgattgtgggactggaggagataaaaggctggcaggggagggcagagggagggaggatgaagcagttaggggcttgaagggggaaatatcaaaggaggcaagagaactgaagggtaaaataatgccaaaaaagaggtggacagagttggcaaagcatatcgtaagcagggatttgagaagaggggattcagatgacagagaacatcccaagggagaagcagaatccaatatagagaatggattggtcttaaatagagctgggagtaaaagattcgcagcccaggaagtcagggaataatacctacggaggaaggacttccaggccaagtatccagggaataatccccactgctatggttctaatgatggtgccctctcaaaaattcgtgttgaggccgggcatggtggcttatgcctgtaatcccagcactttgggaggccgaggcaggcggatcacaaggtcaggagatcgagaccatcctgactaacatggtgaaaccccgtctctactaaaaatatagaaaaattagccaggcgtggtggcggtcgcctgtagtcccagctactcgggaggctgaggcaggagaatggcatgaacccaggaggcagagcttgcagtgagccgagatcgtgccactgcactccagcctgggtgacagagcgagactccatctcaaaaaaaagaaaaaaatcatgttgaaatgtaatcttcagtgaaatagtatgttgcccaggctggtcttaaactcctgggctcaagtgatcctcccacctcggcctcccaaaatgctggcactataggcataagccaccacgcctggccaagacactaccttgaaagcacagagtaggccaggcgcggtggctcacacttgtaatcccagcactttgggaggccaaggtaggcagatcatgaggtcaggaattcgagaccagcctgtccaacacagtgaaaccctatctctactaaaaatacaaaaattagctgggcatggtggtgggcacctgtaatgccagctactcggggggctgaggcaggagaatcacttgaacccgggaggtggaggttgtggtgagccaagattgcaccactgccctccagcctgggcaacagagctagactccatctcaaaaaaaaaaaaaaaaaaaaaaaaaagaataagaaagaaagaaagcacagagcagcccttactagacacaaattatgccagtgacttgatggcgtaattggacttcctgactccagaactgtgagaaacaaatttctgttctttatagatttcctaggctcagttattatgcttagcggcacaactgactaagatagaaattggtactgagaagtggcagtgttgcaataacaaatacctaaaaatgtagaggctgctttggaactgagtaatgggtagaggctggaagagtttggaagtgcatgctagaagaaggctagtttgccatgcattaaggcgattctgacgaggcttcagaagatgaaaagccatagagaaagcctccgtctttgagattatctaggtggttgtgaacagaatgttagaaagaatatggacagtaaaggacattctgatgaagtcttagatggaaatgagggatatcttattggaaactggaggaaaagccatccttgttacaaagtggcagaggatttgttcctggaaagaacagaacaaggtctgggaaagaagggagtttatttctgcagctggttacagggagaaggccggagtaactcaccataccaactcaaagttacaagtttttttctagtgcttatatacattttaagctcccatgctaggagtggaattgcacctccaagcaggagtgtttccttcaatctatatctaaactttaactaggacctagggtctggaaatctttctctagagtcttggaaagctttttaatctttttttctttttctttttttttgctgtccataagtttattgtctgtatctgaaaaatcatcatagaaaattgtttggtttagctctcagcagcctgcttctgagctctgaggaagcttgcattcttttgagctacccaatccttcttctgagcaagggacattttgggatggttccacctcttctttttaacttctttcttgggcttattttcatagactggattctctcgtatagcagcatgagcttccttatacatttcctccatcatgtctggagttaccctgttctttatgtattgagagaactgtttcttgtaagcattttcatcttcttccattaagtagcacatgtaatcggcaacattctggcccatgatgtgcttccggtgtacttctgcattaaattccttgctttcagaaccataaccagggaattgtttggtactgtgagggatagacaagcctccatccacagctcccttcagggcaccaaaaactttattgccagtggtagttctggcaaggcctgcatccaaatagcaggtaaaggcacttggctgaccatcaatgctttccacaatgtattcatcgccagtcacctccacttggccttcatagatcttgtccatgccaaacctactgagaagcctgcgggccagcggcaggccagtacaatatgctgcagcataatttgtcgggccaaccttcacaccatattttggcagttcgtgtgcatatgctgtgcagactatcatatccccctctatatgggcataagcaatctgacaaatgatatctctgtttgttacacgaactatcatcctgtatttgagtgtgttgtatttatttttatcctgtatcaccaagcgtttccgagtatcgtaatcagttttaccctctcatcatcgtcttctaaatttcacttggtatctcttaaagtaggccttattcttaacaactttaacaaaccccatcctgcagaacagagacccgcgtccacagctcaacagagaccagcaggcacagcggcgctggggcagggagaaggggaaagctttttaatcttcagtgggtacctggaacaaggtatctgtgtaaaatgcttttattattcaaccagactttaggctaagaaagcccattttaatgggtttattttaatattccagccctcatgctcagtcacctgtttctccagttctttaatgtttaacttatacattcattagaattataatagagggtcagtggaaactgactgttctggttgctaatgggagcctgccctgccacaaacttggtggaagtatttctgtgtcttaatagttttttggagggtagaatgtaagagcgatgaactaggacatttggcagaagaaatctctaagccaagttttcagggtactgcatagcttctcttaactgcttatagtaaactgtgagaagagaaaagataggacttctaatcaaaagggaagcagattagctgggcatggtggcacacacctgtagtcccagctactctgcaggctgaggtaggagggttgcttcagcacaggaggtcgaggcggcagtgagctatgatcgtaccacagtctgggcaacagagtgagatcccatctcaaaaaaaaatgctaattattattattattatcattgagatggagtcttgctctgtcgcccaggcaggagtgcaatggtgcgatctcggctcactgcaacctctgcctcctcccgggttcaagtgattctcctgactcagcctcctgagcagctgggattacaggcgcccgccaccacacccggctaatttttgtatttttagtagagatggggtttcatcatattggccaggctggtctcgaactcctgacttcgtgttccacccacctcagcctcccaaagtgctggaactacaggcgtgaggcacctcacctggccaaagactattattatcattattttatccaaaatgtgtttattgagatggtttcccactcatcttgattcagggtgcttttagtgctgctttctcctgaaggaccatccttccataagccttgcttttcctcctgtaggctggcagaggaaagtgcagcagccaacacccaaaaccactgttggcacatggctaaagaccgtggtgattttatagcatcctgggcatttcacatccatgaagtaggaattggggctctgcaccaggtgtttcttcttgtgtttcctcttctcctcttctggagagggatgaaggagatcctttgcaagaagcatgttcttgtgggtaggtcgtcagtgctggaaagggccaaagaaaattatttttaaagggaagttgaacataaagatttggaaaattaacagcctggccttgtaaagaattttttaaataagttcaggagacaaaaccaactgtgtggccaactgaccgtttcataaggagattagtatgactagaatgccagatgctattcattaagacaatgggagaatgaccctgaagacatttcagagagcactgagaatgccacaaccatcacaggcccaaagtgccaggtccttgagggaataacaattttaaggaaggagcccaggattccagtgcaacccaagatgcctgtgggaacttggggctcactgactatgctgcctcatgtatctgctccctgaagtcaagcaaagcttccccatctgtggttcaggtgggcccaggtacagctcagatcactcctccagaaaacacaagtagtaaaacatggggcagcatgcatgtggtgctaactgcaggcatgctaaatccacagctgtgaaggcatggctttctccacctaatttccaaggaagccttgaagaatgcctcagggcccaatcagagaactgctgtaggggcagggctgccatagaaagttcccactagggcaatgtccagcagaactattgggttggggccaccacagagtgccctcactagggcaatactcagtggagccatagggacagggccacccctgagttcctagacccagacctgtagatccggtagtgcgtattccaacctgtaatagacatagacacctgactacaacctgtagaactgtggcatgggctgactccagcagtcatggcagcagggtcccctgggggcttgggaacctaagcactaccccagtgtctctgtaaggtgagaggtagaatcaaaaaagctgactctcacacctcaagattgaattttgttggccttgttgggttttgaagttatgtgggacatgttacccctatcttcttgcctatttcctccaccaaccttttgtttttgccatggggtcgagctatgtcacccaggctggtctcaaattcctgggctcaagagatcctcctgtctcagcctcctgaatagctaagactgcaggcaccatgcctggcttatttctgacttttataaagggaatgtttatcctgtgcctgtccaaccattgtattttggaaacacataatctgtttgacttcacaggttcacagctggagagccattgtctcgggattaattgtaccttgagcatcacctatatctgatttagatgatatttacatgcgactttcgacttacacttgaaagttgatgctggaatgagttaagacattttggagttactaagatggaatggacatattcttgtgggtgagaacgacatgaattctcatgtcatggcaagggtggagtgctatggtttgaataatggtgtcccttctaaaattagtgtggaaatttaatgcccaatgcaacagtattaagaggtttggcaattgcgtggtgactaagccatgagggctctgctctaatgcatgagattaacatctctataaaagtgtattaatttaaagggagtactttcttgcccttctgccccattcaccatgtgaggacatagtcatggctcctccacaggatgcagcaacaagacatcatcttggaaacagacagcagccccgtttagacctccttctgctgctttgatcttggacctctcatcctccagaaacacgacaaataagtttatgttctttataagttactcattatcaggtatttatttatttatttttttgagacagagtctcgctttgtcgcccaggctggagtacagtggtgtgatctcagctcactgcaacctccgcctcctgggttcaagtgattctcctgcctcagcctcctgagtagctgggattacaggcatgcactaccacacctggctaactttggtattttcagtagagacagggtttcaccatgtttgccagtctgatctcgaacccctgaccttaggtgatctggccccatctgcctcccaaagtgctgggattacagacgtgagccactgtgcgtggccaatatcaggtatttctaatagcagtacaacggactaagatactcaggaaaacagagccaggaggaaaaatattctatctcagggagttaaggaatcatgcccactcaagaaagagtataagggctgggcatagtggctcacgcctgtaatctcagcactttgggacgacaaggtgggcagatcacttgaggtcaggagtttgagaccagcctggccaacatggtgaaagaccacctctactaaaaatacaaaaattagccaggcgtggtggcacatgcctgtaatcccagctacttgacaggctaaggctggagaatcgcttaaacctggtgggaggcagaggctacagtgagccaagatcacgccactgcacttcagcctgggtgacatagtgagactccgtctcaaaaaaacaaaacaaaacaaaacaaaaaaaacaaagaaaaagagtgtaggggaaaaataacactcagtttattttttagtccaaacagacccctttaacaaaataaagattaacaagagaaaagcaaacaagtttattaatgtgtgtatttcatctacacatggaaaatacccagagaatgaatagttatcaaagaagtgctttgaattccagcatatatagcatcttcagcagagaaccgtacatttttagagaagtgaaaagataaagaaaaaggagattgtgtccgtaggggtgacaacttacggaaaggcaaataaattgcagataaattcagttactaagcatgttgctataaattcctttggtatcatttccaggctgaccagggtctaaagttttcttcagtggttagcctttgttctccctggtaaaagcgtgagtgtggagagtggggagggagagggtaccttttgtcttcgcaactctatatcttgcttttcggccagtaaaggaagaacaaaaaacttccctgcatctgcttcttcttaattgtcttcagctcaacaatgcttccagttttagggtggcatattctggcctcccacaagagccaggaagaacagatgtgcagcccaacggtgaggaaataattttcaccctacaaagagccaggaaaaagaccttccattccaggaagtacctttcaaaagatacctgggagtctaatccagcttcaaactatactctgaattcttaagaatcaaggccaggtgtggtggcttatgcctgtaatcccagcattttgggaggctgaggcaaggggatcgatcacttgagcccagggtttgagaccagtctgggcaacatagcgggatagtgagatcctctccacacacaaaaattaaaaataaaaataaataaaaaaaattaaaacctatccttacaagcttcagtggacacttgtccagagcaatcaatggctccagagtctaattcaccagtggatccccaatcaacttattaggaataaagacaaggtttcaaaggtgcaccctgaggtcctgggtgagaggtccaggggaccaaaaatgaataactgaaaaaattatatattcagtgatacttattaaagcatggtaaagaaaactttattcaggaccattgtgatagatacagggaccaatgcaatgggattttgcaatggaatagagagattgctctgaactccaaatagatcatgggaaaaagggacgttataaccaagaagcagggttggggtgtagtgggtgaaggaatggaaaattactaaaaggaaacatcagggataagggggattctggctaaactgacacctaacaagattcttgttaaagatgggccagagtggtcatgtatcacttggaagatggtggaagatgaacctgatcagatatcaagggtgatcagatatcaaggagaagagggttcttttttatatttatttatttatttatttttgagacagagtctcgctctgtcatccaggctggagtgtagtggcgtgatctcggctcactgtaacctccgcctcctgggttcaagtgattctcctgcctcagcctcctgagtagctgggattacaggcgtgcaccaccatacccggctaatttttgtatttttagtagagatagggtttcaccatgttggtcaggctggtctcaaactcctgacatcgtgatctgcccgcttcggccacccaaggtgctgggattatgggggtgagccaccttgcccggccgagaagagagttcttgataaacagacttccttgttaaaactagattttataatgaggtccacagatgggtggaggagaagcctgagtaaattttggttaagcagagaaactttgtcatccctcctgtatgcattatgctcccttttctccagtggagctctcttcaaccttgatgttattgtccaatcagtttgttttcccagtgttgatgttctgatttcatcctacaaaaatatagcataaacttgtatttgttgcattctacaacataagcctgacaatataacaaactgttcccaaagttataaattcctcgtctttttatttgtaatttgacttttaaaaatctatgtaattatagaagaatgttgctactataaaaattttaaggggtggcagggaataattccaaaattataaaactccttgtgacaaatttaggaatgatattcagctagttctatagttttttattccttgaataatcagcgatatacatctgattatatacacacattgtggtttttttttggccaggttgactttttttttttttttttttttgagatggagtctcactctgccacccaggctggagtgcaatggcacaatctcggctcactgtaacctctgcctcccggattcaagtgattctcctgcctcagcctcccattacaggcacccgccaccaagcctggctaacttttgtatttttagtagataatggggtttcactacgtgggccgggctagtcttgaactcctgacctcgtgatccacccacctcggcctcccaaagtgctgggattacaggcgtgagccaccgcgcccagccttggttgacttattcttttaaggagcaatgtgggttaatgtttcaaagtgaaaaaatttaaaaacttaggggaaagtggggggagagagagacaaagacagagacagaaagagagacagagtgagagatggagagagatcagataggtacataagcttagtgactcagcctgtagtcccagttacttaggaggctaaggcaggaggattgcttgagcccagaaactcaagttttcagtgagcagtgatctgcaacactgcactccagcccatgtgatagaaccagatcgtctctagaagaaaaaaaaagaagaaaaaaatacatatacatacatacattggtgtttgtttctacatatgcttcatagtatatgtgtacatggattataggtagatcatataatggtaacagtattaaattaggtgtcagcatttgttgaggaagtagtacgctcgtgtttgaaattttaattaagaattgtgtacggagttggttccttccggtgggtttgtgggtttgtggtctcactgacttcaagaatgaagccacaagccttctgaaccttcgtggtgagtgttacaactcttaaaggtggcacagacccaaggagtgagccgcagcaagatttattgtgaagatcgaaagaacaaaatttccacagcatagaagcagactgagcaggttgccactggtggctggggtggagtggccagcttttattccttatttgtccccacccatatcctgctgattggtccattttacagagtgctgactggtccattttacagggtgctgattggtccattttacaaacctctagctacagagcatcgattggtgcatttttacagagcactgattggtgcattttacaaacctgttgtaagacagaaaagttctccaaggccccacctgacctacgaagtccaggtggcttcatctctcagaatcagcttttaaaggccataaatttccaggtaagtaggaatagaagaaatgaacatttcctttgagatctatgatgtcatatttttttctccatcaacgatttagttccttctggatcaaatactttttaaatggatgtatgttttatagtagatgttatgttgtcttaattattttaaaactcctattcctggactctcctgaagaggagaatttagtaatttcgaagtattttttgaggctagggaagaaaaaccaagattactgcataaggtttcaggggatgttccatgcctgccacctggtgaaaatgagggagctttcctcctacctgccaccattacacctgcctgcaggtaataacgccatcatttcaacgcggcctggggtattctgggaaggtgacgtgtgggggcgcagtgaccgctagcaggggccaaacccgccctggtctgcgctgcagtgcgcagtgaggatgttggtgctgctcttcagggttttctttccgcagccacgggaagcccgtgttccatatttgtttttcatgttctctcgtttttatgttgtggatttagttttttaaaaaccataaatgttcctctacagtcttaacaatgtaccctgtaaaataagattttaaaagagccaacttccctattaatcttatacttttttcttttcgttctggctttaacaaatgtgacctaaagagagctcttgattttatgtagaacaatacaagaatagttttacattaatcttatggttagaaaaatcatttatgggcaaatttgttcccatgccttacttttaaaatattgtgttgtctttaattttcaaaatactttaaatatttttcagtaagtttgagggtagaatttattttaatgagactcctcttataaaaagtacgtatctgtatgtgcatatgtgtatactgaatttgctttgcttttgattctatcattctgtcacttttctatcaaaatatctctaatggacagaggccagagacaaggacttttacagcaaatttgccacagtaccacacattttatcttaaaagatggtatggattttgcataacatatatatgcaaacatatatatatataacataatatatatgtgtatatatatataacattatatatatgtgtatatatataacataatatatatgtgtatatatataacataatatatatgtgtatatataacataatatatatgtgtatatatataacataatatatatgtgtatatatataacataatatatatgtgtgtatatataacataatatatatatgtgtatatataacataatatatatgtgtgtatatataacataatatatatgtatatatataacataatatatatgtatatatataacataatatatatgtgtgtatatataacataatatatatgtgtgcatatatataacataatatatatgtgtgcatatatataacataatatatatgtgtgcatatatataacataatatatatgtgtgcatatatataacataatatatatgtgtgcatatatatataacataatatatatgtgtgcatatatatatataacaatatatatatgtgcgcatatatataatatatatatgcgcacatatatataacaatatatatatgtgcatatatatataacataatatatatatgtgcacatatatataacataatatatatatgcgcacatatatataacataatatatatgcgcgcatatatatataacataatatatatgtgcgcatatatatataacataatatatatgtgcgcatatatatataacataatatatatgtgcgcatatatatataacataatatatatgtgcgcatatatatataacatagccgtttggtttattttatgtgtgtgcgttaaaaagttattcaattgctgggcgtggtggctcacgcctgtaatcccagcactttgggaggccgaggcgggcggatcacgaggtcaggagattaagaccatcctggctaacacggtgaaaccccgtctctactaaaaatacacaaaaaattagccgggcgtcgtggcgggcacctgtagtcccagctactcgggaggctgaggcaggagaatggcgtgaacccgggaggcggagcttggagtgagccgagatagcgccactgcattccagcctgggcgacagagcgagactctgtctcaaaaaaaaaaaaaaaatattcaattatgcttgttaaagcaaggtaagggtcaccatggtgataggtacagggacctctgcagatagagattgggctaactccaaacagcgtaggcaagcggaaatttataaccaaagagcaggctgggaggtctgtgaatggaaaattaccaatgagaaacctcaaaggttagggggattctggctaaaccagcctaacaggatttttgctgaagacaggccagggtgatcaaacatcacttgggggatggtgcaggatgatgaacctggtaagatattaagggtgatcagatatcaaaggtaaggaagttcttgctaaagctggatttgacaaggaagtgcacagactggagaaggttcaggtgcctgactaatgtttgatcaagcaaagaatctttgtcagtgtacagaacgctatgtttttataaaatgttcctctgccccatttgtatctccccttttcatggaacacaaagcacgttttgcataacttctagatacatgtacttctattttgaatgacctgatatatcttttttctttacaattctcaacctcagcatatgtaagtggaactcagaaggcaacattccctgaacatactcttccaccagaatctcctctacagatttttgctgccccttttaccagtggctgaatctactttctcttatgtaagtagaaattttatatatctccagcctcttcctccttaccttccacttgcatgcacatcctgtctagtctgtgacctcctctgttataaatgcttgtaaacctttttttctgaatcagaaacgtgttgtgttgctcaagccgtgttcattttaattacgatttaactgcataatttaattatttccccattttttggatacagtgtttgcttttctccggttactttgttctagtatatccctctggcaagagcagtcatttccccacttgagtgtgcattagtatcacctgggggcttgttaaacacagcgtgcaagctccatcccagggtttctaattctcagggtttggtttgcggcagaagaatctgcatttcgaacaagtgccaggactggtctgaggaacacacgttgagagaggtgggattcgggttcactaacctgggttagagaaaattacagtaatgtgccaaatctgaggagggagcagagctgaagcccagtttcaatatgtgaatgagtgctttatacactcaaaccccctcaagggctggggagtaagggagaacgtgggcgggcagcgggcgtgtatagaggcataaactcaatcccagacctatggattcagaatcacatgttaacaattcttccagtgttttgtatgtttattatagtttgagaatgactggaccaaattgcctccaaaatcttaagtcccagcagtgaagcgaagctcagacatcatttgcatagctattgctttgtgtctgtgttttaggtcagctgctgttaaaggtttgtttcggagagttacccaggtgtagtacccttccaagtagataatgattgaaagagtatgtgctggaggtgtatgatattttccatccacttcagcccatttttctgatgggtcagtgacagtccatgatttgtctggtgtaatacaaattctggaagtggcatatatccaaggacagccataatattccacttggccaaggctcttctgacaggctcatgttcatgcaggatcagatctgacccagaatcaacagaactgaagctgcaaattcagctttgtgaaggcttcagatgtagccatggttaaagaagattgacattaagcaggtgagcagagtttgcttgaggttcacccagggaattcgtgaggatgcaggtgcgtttttttatggcctgaaaagcccagtttttgaggagttacagtccctctcagaaactgttcctgcagagtagccctggaaacatgtttgtctgcattcaagaaagatcttccttctgttcatataaaggaagccaaacttatttcccaggtaagggagtggaagcaactgtgatacggaatcctaaggcatgggggttagttgtaatccaggcaatatgtagggtcaggttctccaagtcctcctgtggttaaagggctccaccctaggaaagtgagccacccagggcttggtaaatgaccttatgatcagcccttggcctgttaacatgtcgtaactgaggcacaggactgggttcttggtttgaatttgctagtcagatggccattgcagaaagggaagagagcacagtccttcaggccaactcacttggcctattgaaactggcttttctgagcacagtctagtattgttgcgaattaaatacagcagaggatgtaagttaccagtattagtcactatcagttgagtacttattctgtatcagccactgttcctcttttccatttccacctgttatatgttagtgacgataaaaatgccatacagaccgggcacggtggctcacgcctgtaatcccagcactttgggaggccaaggcaagtggaccacctgaggtcaggagtttgagaccagcctggccaacatggtgaaacctccgtctctactaaaaaaaaaaaaaaaaaaaaaaaaaattagccgggcaccgtggcgggctcctgtaatcccagctactagggagactaaggcaggagaatcgcttgaacctgggaggcggaggttgcagtgagccaagatcgtgccattgcactctagcatgggcgacaaaagcaaaactccgtctcaaaaaagagaaaagaaaaagccatacaaaaaggctaagagccttgttcaacctcacacatgaaagtggcagggctggggtattaattcaggcattcacaatccagatcctctacacatttcactgacatgaaacccagaaatttcaggtctactaccttgaacccagaactatttttctcaaacttgttttcttgtgagctatatatagggaaaaattgcatacaatacagtactgctttacaaatatatcatctaatacccaagtcaagaaagacatgatcctgagctccctcaaaactcgtgggtatcccttctgaatcttgaccttttattctgactgagatgaatcctccatgctgctctttgtaattttattcctcgtgattacatacttaagctacaggaatacatcttacgtagttttgtttattcttaactgtatgtatttttttgtcttttccacttgatattgcattttctgtatttatccatgttgtgtgtaattccagcttcttaatttttattgatggtgttctctcattatatataatatatacagcatgtagcatgtatctttctcactgtgtatgtatacagagtgtatgcatatcactataggtatacagacatatcattatcctagtatttccatatctatgccacagtaggcagatccttttttttttttttttttttttttttgggaagacagagtctcgctctattgctcaagctggatggagtgcagtggcgcaatctcagctcactgcaacctccgccttctgcattgaagcgattctcctgcctcagacccccatgtaactgggactacaggcacctgccaccacacccagctaatttttgtatttttagcagagatggggttttaccatgttgtccaggctggtctcgaactcctgacctcgggtgatctgcctgcctcagcctcccaaagtgctgggattacaggtgtgagacaccatgcgcggctgcagatcccttctatacctgatgattgtttgggttgtgtctagtctgcagttatcaccaacactgcaatcgtaatcactgaagtatgtgtatcctgatttatataggtacacatctctcaaggatctgtaactggtagtggaattcatggatcttcaattcaaatgttgctcatggcagtgttaattataacaaccactttggtaaactacctgctattacctacaaaaccatgtgtaccttacacacgcaccatccattctactgtgtggagtaggccacggaaaagtacatgcacagttgatgaaaagacatgtatttaaatgtttatagcagcattatttgtaatagccaaaactggaaataaagcagagtgggtaagtaaatggtggtataggaattcaatggaattcaactataaataaaaaataatgaactgtatctacatgtaaaaaccttgatgaattttataaacacaaagttgagcaaaataatctaggcaaaaacatacttgtctgagcccatctctgtaacattcagaagtcagtatgacaagtcaggatggtggttacctgtgacaggagagaggctgttttgggaagggctcacttgggtcttctcagttgctggagttcactgtgataaatttaggatttgtttctttttagtgccgtgtatgtgtgtgtgtgtgtgtgtgtgtgtgtgtgtgtatataaacatttttttttttttttttttttttttgagatggagtctcactctgtcacccaggctggatgcctggctttttgtagtttagtagaaatgaggtttcagcatgtagctctggctgatctcaagctcctgaactcaggagtctttcctcctgtacaggagggaagacctttcctctactttctgagaattcaataattgagtccttgaaagaaattgacagtagtcagattaatgggagaaaaggtatacaaattagatatggacacagggacatcacatgaaagaaaagcgaatatcccagaacccagtgagattcagaagcttatgtaccctcttcttaggacagagggtataggtgattaggtaacttaggggagagtaaacagtttgggggaaagataaatggactgtcagaagaacaggtaacagccggtgacaaagtctgcgtgtgttatcaaggtctactctcctctcctgtgataggagccaatcttccctggttagtgagtttcctggggaggggattcatgacaattaagttccttttagataatctgtctttagataaggaagctcagagaaaacctctgcctgtatgagctgctccccacataacctcagttgaaagtaatcagcacaccaaagcatcatattttggggtggagatcctcccgcctcagtctctcaagtagctaggaccagaggcatgcaccatcatgcccggctactttttttttttttatttcttgcagagacagagtctcaccatgttgcctaggctggtctccaattcctgacctcaagtgatcctcctatctctgtctcccaaacagctgggattacaggcatgagttaccatgcccaggctaggggtggcatttcctgaactccttcagccctcttgggaaatgtgcaggcaggaagaaagaaaagaatacccttgtccacagccaggtcttgttgagcttatgcttggcagaatagaaccttacacccagccacgtgaaaactgggatgataaatgtctgcatgtctgacagaaggtttggcctctgattcagctgtggtgatttttccatctacttaactccaaattctattagctagtataaactctctattggactatgaacacagtaagtacacaatcatatgattattttatctattgacttaaatagaattgtgtatgaaggctgtactgaagttattcagggttgagtcaggaaaagctaaatttcaacctcttttaagaaaaatattgatgcctccaaatccatagtatatatgttgcttactagcttataaagggcccctggaagaaaggacatttccggtgttttatgtcaatcataggaaaataagctataagcttttttttaattctttgattctcaaaagtaggattgtggccaggcatggtggctcacacttgtacagcactttgggaggctgagatgggaagatcgctcaaggccaggagttcgagaccagcctgggtaacaaagcaagaccccatctctacaaaaagaaaaatgtatgattgcgtccccctaccactccccaacacttccctggctccacaccccagttcctctgctctcatttctgctgtgtcttactccatgaagctttcaaaactgcttttatagagtcctccttttcttttttataaatttattattgttgttgtttaattaaaagacaggatctcactctgttgtgcagttgtgcgatcactacagcctcaatctccaagcgatcctcccatctcagcctccccagtggctgggaccataggtgcataccaccatgcccagctaattttttttttttttgagacagagtctcgcactcttgcccaggctggagtgcagtggcgcgatctcggctcactgcaagctctgcctcccaggttcacgccattctctggcctcagcctcccgagtagcggtagcgcccgcaaccacacccggctaattttttgaatttttagtagaaatggagtttcactgtgttaggcaggatggtctcgatctcctgaccttgtgatccgcccgcctcggcctcccaaagtgctgggattacaggcctgagccaccgtgcccggcccactaatttttaaatctttttgtagagatgggatctaactatgttaaccaatctagtttcaaactcctggcatcaagcagtccttctgtccaaagtgctgagattgcaggcatgagccactgtgccaggcccctcattctttaaatagctactttagattctattgtaaggatattttaataattttccaacttttattatattgagtaggtgattcctttttaaattatatatgtaaatttttatttatatatttgaataatatgtttacatagttaaaaatcaaaatatacgaaaggcatacagtaagaagtcatctctttccacccgtaatgacaatatatccccttttgcctggcacagatgcacacataaattattgtcctgacatgattatgaataatcctgctttctctcagaagtgtgctagtttgaatgataaattatgcagacattctgcttgtatccctgcttcttcaccatgctgttatattccttccaattcagaggcaaatgtgatatcattgcctatgtgtcttccagaggaattttatttatattttgtaagtacatacatggattctggttttttttttgcactttttaacaaatagatgtatccatgctattttattttaaatttttactttgaaacaaccttaaacttacagaagttaaaagaatattagtagcaggtgtgctggctcacgggtataatcccagcaccgtgggaggctgagatgggtggattgcttgaggccaggagtttgagaccagcctgggtagcataatgagacctcctctctacagaaaaaaaaaatgtaaaagttagttgggtgtggtgttgcatgcctatcgtcccagccactcaggaggctgaggcaggaggatcgcttgggtacaggagttagaggctgcactagaccatgatcacaccactgcactccagcctgggtgacagagtgagaccctgttgcttaaaagaatattttaaaaaaaacctaccctttatccagattcacaaatactaatattttttcacattatttaatcaatttttctccttccctccctctttcatttctcccccttttctttttttttggagacatgatcttggtttgtcacccaggctggggtgcaatggcataatcatagctcaatggcatttcaaactcctgggttcaaagaaacctcctgcctgagcctccagaatagctgggactacagtcatatgctaccgtacctggctaatttttaaaattttttatagagacaggatcttgccatgttgcctaggctggtctcaaactcctaggctcaagtgatcctcccaccttgacatcccaaagtgttttgattacaggcatgagccaccaagcctggcctcctttccctcttttttttctccctctgtttcccactgcttataaagtttttaaattttttttttttttttttttttttttttttttttttttttttacttttgaccactttgagagaaggttgcagacatcatgtccctaatgcatttcctgagaaccgggatatacgtttggataatcatagtaaagatattaattcaggaaatataacatttatacaattattttatctaatctacaggccataacccagtttcttcatttgccccaataatgttttttatagctttttcatgttaaatatcttgtttggcactaagtatcttatcagtctgccataatgtttaatatctttcctctgaaatggttcctctgcctgcctttgcctttcatgtgtttgtgacttttgaagcatgcatgctaggtatgttacggaatgtcctcagcttgagtccatctgaagtgttcttaagactggattctactgatgctgttttggttggcacaacacggtgtttactattgtggtcgtcaaaatgatgttttatggctaaaccattctttcaacatttaatcatcaaggaaatataaatcaaaaccacaatgagatatcatctcatcccagttagaatttgctgttatcacaaagacataaaaataaatgctgatgaggatgcagatgacagggaactctcctatacttttggtgggaatgtgaattagtatagtcattatggaaaacagtatgcagagtcctcaaaaaactacaaatggaactaccctgtgaaccagcaattccactactgagtatttatccaaagttaaatcagtgtattgaagagagagctgcactcttgtgttcattgcagcattattcacgatagccaagatatggaatccaccgaagtgttcatcaacagacaaatggattaaaaaaatgtggtgcatatacacaatggaatactatttagccataaaaaaagaatgagatctggacattcacagcagcatggatggaactggaggacattatgttaaatgaaataagccaggcacagaaatataaatagcttaaaaagttgacctcatagaagtagagagtagaattgtgattaataatcacaattataaataatggtcagtatcaaaaaaaattgtcattctacagtgctgcagaacattagaacttgttttctctatctagctgtaattttccctcttttattttttttgaaacagggtcttgccctgtcacccaggcatggcataagcacggctcactgcagctcaaacaatcctcctgcctcagcttctggagtagctacaggcacatgccatcatgcctagctatttttttttaattttctataaaggtggggtcttgccatgttgcccaggctagtctcaaactcctggcctaaaacaatcttcctgccgtggtctcccaaagtgctaggattacaggtgtgagccatcactcccagctccaatttttagatactgaccccatttagatacatgacctcagaacacattccaagctcatgttgtatctctcttgtccccactattaaatcagctgtgttttttccaaggaatcctgatttctattgtggagaagcgtacttagaaaccaaggtcttggtgctactggtatgttattgcttttaggcccttccagatatacgggatataaagatatagctatatgtatgtgactatatgtattgtgtatatatgtatgtagctatatgtgtgtatgtgtatatatatcttcatgtatttatagtgatattttccatcccaatctacaccgcagggtttttccttgccttcctatttgtagagcttccttccacattaagaaccctctctcccagtgagtgtcaccccatttctgtttcatctctttccctactctcccccttgcctcctagggtcccctttcctctcatcagttgccagacaagaggagcatcatcatacacacatcatagatttaatattaaacttttaaaattttcagataaatgtaagcaggcttctgcagtgaaaggggccaggtctaggaagatggggaatacttgcaggcacctgggaagctcagggaagctgcaggtaccctgtcagttgggtgtcccctcatgagggtggcagactgtctccttgagttctgggtggcagaaatggcccagggccctgggctgagacccagccaactctctatggggctgccacacgacttcctaaaaaggcataaacacattttcttccaagtggagtccagcatattttattttcctgttgaatggtagacagcatgagagcagggtccatgtgatgatttttctgtcagtatcagtttctgcaagagcaaaaattacatatttttatttttcaaataaaatcaattgagacagtaacaaatttgctcaaagaatcaacctgaacacatgtacatctattatgtatcaataaaaaaatggccaggcacggtggctcacacctataatcccagcactttgggaggccaaggcgggtggatcacgaggtcaggagatcaagaccctcctggctaacgcggtgaaaccctgtctccaccaaaaatacaaaaaattctctgggcgtggtggcaggtgcctgtagtgacagggcgagcttgcagtgagccgagattgtgccactgcactccagcctgggtgacagagcgagactccatctcaaaaataaataaataaaaataataaatttttttctagataaaaaatataaaaattacaccacagtccaaaaaaaaaaaaaaaaaaactgttcaagactgatctttcatagtgattgggtctatgagtaaatgttaaatagatgatttattaggtttctttttatttcaatgatgagatggagaaatatattattttacatgagggcaaaaaatattttatgcatagatattttttattttgcctatgtccttaaattctcagaatatagattattgccttcagaaatctgtctaggttcacctataccttattagaactcagctttgctggctgtggtacacctgtaatcccagcactttgggagactgagaagggaggatcacctgagctcaggaatttgagaccggcctgggaaacatagggaaaccctgtctctacaaaaatacaaaaaaaaaaaaaaaaaaagtctgggtgcagtggctcacgcctgtaatcccagtaaatcccagtactttgggaggccgggccgggtggatcccgaggtcaggagttcaagaccagactggccaacatggtgaaaccccgtctctactaaaaataaaaaattagcagggcatggtggtgagcatctgtaagcccagctactcgggaggctgaggcaggagaattgcttgaacctgggaggtggaggttgcagcgagccaagattgtgccactgtactccagcttgggcgacaaagcaagagtctgtctcagaaaaaaaaaaaaaaaattagccaggcatggtggtgcacacctgtagtcccagctactcaagaggctgaggtggggagccctagtgggtgcagtgagccaagatcacaccactgcactccagcctgggcgacagagtgagactctgtctcaaaaaacaaaaaagtgagctttaataaattctataaaacttttttctagttgagagtacgttactacaagctaacttttaaaaaagtcatattatttgattactaggaactttgcaattagttttgcttcttctggtttttatttttgcctggcacaacatttccttccttggcccctgtctgtattaataatgctgccaggatatactgaatgattttattccagttttttctaccttaattatgttaaagaaaaacaaaagctgggtattagttatagtggtaaggacacattttaatcactaataactattgtaatcgtgaagaaagtccagcatgaactgaactcaactttggtgtgtacagaggtgactgggtattttaaaggaagaatgaagctgggtgtctactggacactggaatgaagctactgcagaggctgaggcagaaggattgcttgagccaggggtttgagaccagcctgggcaatacatcaagacctaggctgggcggggtgccacacgcttgtaatcctacactttgggaggtggaggggcggggggtgaatggcttgagttctggagttcgagaccagcctgggcaacatcgtgaaacactgtctctacaaaaatacaaaaattagcagggaatggtggcacatggctgtagtcccagctactcagggggctgaggtgggagaatcccttgaacttgaggagacagaggttgcagtgagccaagatctcaccactttactgtagcctgggtgacagagtgagaacctgtctcaaaaaaaaaaaaaaaaaaaaaaaaaaaaaagactttgcttcacccacaaagggaaaatcagggaataggagggagttgagttgtggggtagggtatgctcagttgagtcagagaagtaaaaatttaccaaaagtggtggttccatgtaaaacctacctgggattgctaactggtgctgtttgaagttagactatgaccctcgcacagaggccaggagacaggggccctatcttctgctgttggctggaacaaagagtaaattcatttgggaggcttcacttttttcaggcaggctatttaagggggatacagtcaaccaggggatatggccttgagatgctagaatctatgttagtattttgttcaaatatttataggccagggttaagactgactttgtttctttgttttttgagatggagttttgctcttgttgcccaggctgaagtgcaatggtgcgatcttggctcactgcaccctccgcctcctgggttcaagtgattctcctgcctcagcctcccgaggagctggcattacaggtgctcgccaccacgactggccaatttttgtactttagtagaaacggggtttcaccatgatgtccaggctggtcttgaactcctgacctcaggtgatccgcctgcctcagcctcctgaagtgctgggattccaggcatgagccactgtgcccagcgtaagacctagttgagaaggcagctcagaggaacctggctagagtttggtcaagaagactatctctgtcaatcataatgtgtattccaccaataagagtcattgagtctgtaaatgtttttttttttttcctttgagacagagtttcactcttgttgcccaggctggagtgcaatgacacaatctcggctcactgcaaccttggcctctcaggttcaagtggttctcttgcctcagcctccaaagtagctgggattacaggcatgtgccgccacacccagctaattttgtatttttagtagagatggggtttcacgatgttggttaggctggtctggaactcctgacctcaggtgacccacctgccgcagcctcccaaagtgctgggattacaggcgtgagcccccatgcctggccaagtctgtaatcttgattgaaagtttacttttgactgggcatggagctcatgcatgtaatcccagcgctttgggaggctggggcaggaggattacttgagtccaggagtttgagaccagcctgggcaacacagggagacctcttctctacaaaaaataaaattagccgggcttggaggtgcgtgctgatagtcctagctacttgacagactgaagtgtgaggatcacttgagcctgggaagttgaggctgcagttagccaagatccatgccactgtgctctagcctgggcgacagaatgagaccctgtctcaaaaaaacaaaaagaaaagaaaagttgactttttgccagctgttaggaaaacatctgtggctctggagggcggctggtttaaagaaaaaaaaaaacaatcagacatacctgatatctacaagaggataatgagcttagtatggtgtgtgtaggagcctagaggagagaggctgggaggggattcttggggaaaacggtggttgagttggggttcagaggcaagcccctaggtcttaggctgggcacggtggctcatgcctgtaatcccagcacttcaggatgctgaggtgggcggatcacctgaggtcaggagttcgagaccaggctggacatcatgatgaaaccctgtttctactaaaaatagaggagaatttgatggccattcacagtcaagggaactgaacacatcaaagggattgccagaagggcagaagtcctgacttacaggtataaggagaaacagaagaggagacaaggtgtggggtctaccaggtgggcaggcccattgagtagagggtacatggcattcattgaaggattttcatcaaggcagtcttctggtaagatacggggaagtccacaggctaattggaaaacagaaagaatgagatcatggagacaaatttagggactgactccgtctgtattaatttataccaggggtcagccaagtgcaacctgtggctaaatttggactgctatgcatacatgtatggcttgtgagctaacaaagttttttatggttttaaatacttgagccaggtgcggtggctcacacctgtaatcccatcactttgggaggccgaggcgggcgaatcacctgagtttgggagttcgagaccagcctggccaacatggtgaaaccccgtctctattaaaaatacaaaaattagctgggtgtggtggtgcatgcctgtagtcccagctactcaggaggctgaggcaggagaatcatttgaacctgggaggcggaggttgcagtgagccgagatcatgccattgcactctagcctgggcaacagagtgagactctgtctcaaaaaataaaataaataaatacttgaaaaaagcaaaagaatagcatttaataaaaattatataagattcaaatttcacggtccataagtgaagttttattggaatacactcatgcccacttgtttacatattgtctgtgactgctttcacacttcacactacaaaggttgagtagttgtgagtgatcgtcctcaaagcctaaaatatttactctctggctctcctctctacagaaaaaggctgctgatctctgcctgattcattgattgattattatttgaaatggggtttcactctgtcatccaggctataaagcagtggcgtcatctcagctcactgcaacctccacccgccgggctcaagcaatcctatctcagccttctgagtagctggaagcagaggcgtgtgcctccgctcccagctaatcttttgtatttttggtagagacggggtttcaccatatttcccaggctggtcttaaactcctgagctcaagtgatctgcctgcctcagcctcccaaagtgctgggattataggcatgagccaccgtgcttggctgacctctgatttatatggccagatgggggcaggtactcagttgcttgtgcatattttgttgggagatcacaagttagcaagataaaagtgctttcatcacagaggtttcagtctagtagaagttaaatttttgtgccgggttcagtggctcacacctgtaatcacagcactttgggaggccgttgcaggccggttgcctgacctcaggagttcgagaccagcctgggcaacacagtcaaaccccatctctactaaaatacaaaaatctagctgggcatggcagcatgcccgtatagtcccagctactcgtgaggctgaggcaggagaattgcctgaacccgggaggttgaggttgcagtgagccgagatcatgccgctacactccagcatgggcaacagagcgagactttgtctccaaaaaaaaaaaagttcgatttttgtttaataggtgagatcatatgaaacataaatataagtactgatgtagggattgtgctttgtgaatgggtctctgcctgcaaaacattcctgagaagctttctgaagggttcaagctgagaacagaaggatggagaaagagattctgtaagttaggaggcaagaatctgagctaagatttggatgtgacaggaccatgagtggatagggaatgttttgtttcttgagtgggaagtgggaagcattttgggaacaaggtaaggaagagagaggaggctgcagtgtttttaaggagtcctgcccacgccaagaagtctggactggaggtcatttgctttaaacatgtcatctcaagcatgtgtgatctatttggagcaaatataatcaagggaagttttaaacaggagagttttcagagcagtggagtctgaaaagttgccctaaaataaggttgagcataagaaagtccttcttgcttctggaaaaagtggactatgggtgctcactctttggggccagacagagaagaattaaaaatcatgggctgggtgcggtggctcacccctgtaatcccagtactttgggaggccaaggtgggtggatcacgaggtcagttcaagaccagcctggccaacatagtgaaaaccacgtctctactaaaaatacaaaaattagctgggcatggtagcgcatgcctgaagtcccagctacttgagaggctgaggcaggagaatcacttgaacccaggaggcggaggttgtggtaagccgagatcatgccactgcactcccgcctgggcaacagagcaagactctgtctcaaaaaaaaaaaaaaattgtgttatttctcccttttgcacctaatctcccactgaagatgactgcaactttcctgtgaattctgaacctgctgccaaaagatacttctttatattccatgattttgtgtaaaactttgtggtgagaattagagaaagcttaatttgctgcttggcatccagaattaggaggccaagttaggctcccatgttaattttcagaaagcccatgttcctgatatctggtagggatggcggtgctgaactgtgaaggtgttggaaaccagaattttggcagaaacggagtcagatttgaacatggtacaaatttggaccaagggcctagtgatagttaggtcaggaaattggggactgtattggtccattcctgcactgctataaagaactacccgagcctgggtaatttataaagaaaagaggtttaattggctaatggttctgaaggctctaaaggaatcatggctggggagtccctaagaaacttgcatcatggcagaaggcagaggggagtcaggcacatctttacatggcagaagcaggagagagagagcaaggggaggaggttccacacactttcagacaaccagatcttgtgatatatcacaagaagagcaccaaaggggaaatccacccctgtgatctagtcacatcccaccaggccccacgtccaacattggggattacaatttgacatgaaatttggatgggggcacagactcaaaccacatcagggaccaaagaaatattttacttattttcagttatcaatggaatttactgctgatgagaaataaatgtatcttgccagtaacttataaagtaataaaaccggccaggtgcgatggctcacgtgtgtaatcccagcactttgggaggctgaggtaggtggatcatgaggtcaggagatcgagacaatcctggccaacgtggtgaaactctctctactaaacatacaaaaattagctgggcatggtggtgcgtgcctctaattccagctacttgggaggctgaggcaggagaatcacttgaaccagggagccggagattgcagcaagacgagatcatgccacaccactccagcctggcgacagagcgagactccgtctaaaacaaacaaacaaacaaaaaaatcaaaacaatttccctagaaatgtataattattgacactttttagtatttaaaaaattttcagtgataccctgtatttacaaaacaaaacaaaacaaaaaaaacgaaaaagcaagacaaaaacaaaacaggcatggtgatgtgcacctgtagtcccagctactcaggaggctgaggtgggaggactgcttgagcctaagagttcaagccatgatctcaccactgtactctagcctggatgacagagcaagactgtctctaaaaatttttttaattaaaaaaaaatttcatcttgacttgcttttcatgtgaatctagtgtatttgctactttttgataatgctttgcactttttaaattgtaaaaacattacataaaattttcatcttacccgtttcaggggcactaagtgcattcacattgatgtgcaaccatcaccactgtctagctctagaactttttgtcttacaaaactgaaaattgcccattaaataataactccgtttcctcctccccacaccccatcccctggcaaccaccattctacttcctgtctccatgacatttgattagtctggatatctcgtataaatggaatcatacagtatttgtccttttgtgacaggcttatttcattctgtgtagtgtttccaaaattcatccatgttgtagcatgcatcagaatgtacttcctttttgaggttgaatgatactccattgcatgtatgcattacattttatttattaatccatcagtggatgtttaggttgcttctgccttttgggtaatgcaaataatgctgctatgaacatgggtgtgcagatacctctttgagtttctgcttctaattcgttttttttttttttgagctggagccttgctctttcgcccaggctggagtccagtgccacgccatgatctcggctcactgcaacctccacctcccaggttcaagcgattttcgcttgattctcctgcctcagcctctcaagtagctggaattacaggctcaaaccaacacaccaggcgaactttttatatttttggtagattgggggtttcaccatgttggccaggcaggtctcaaactcttgaactcaagtgatccacccaccttggcctcccaaagtgctggtattacaggtgtgagccaccatgcctggccttctgcttctaattcttttagatataaccttgaagtgacagtgctaaatctagcactgtctggtcttgaactcctgacctcaagtgatctgcctgccttggcctccgaaagtgctgggattacatgtgtgagccaccatgcctggccaattgaagatttttattacttacattttcccagaaagggggcatgccacactacaccacatcacgtgaggagcactaggttttggtcaggaggcagaagataggagtgaagggaaaaatctagggcaaagcctttactggggactccaagggaaacacagggcaggtttgagcataggatgggttagtttaaataattctggttggctttgggctacagggatggtctctagtgacttggtttgtgccctgggtatatagaatatgggaaatagtggccagcgagagttagctaaggagttggctgggctacagactgggattggttgtttggcatatgaaagacatgcttatagacaaattgttattatattcgagaattagctagctttgggaaggacattctctcccatgatttgcaaggccctcaaaagccagagcaacaaaaatacagaaaataagatatagttaatataattggcttggtgatgaacggatcccaaatagtcaaacacagaagctaagaaaacccagaacacatggtaattcttctgttgcattttttttaggaaaccacatagtgttttgcatagtggctgtaaaaattttccattcctaccaacattatacaaggttttcaattcctctggtcttcaccatgacttacgttctgtttcttctgtgttttatagtagccatccaaatgggtgtgaagtggtatctcactgtgattttgattttgattttgatttccctgatgattagtgatgctgagcatctttggatgtgcttcttggccatttgtatgtctttggagaattcttattaagacgtttgcccatttttatgtatgtatatatgtatgtatttatttattgagatggagtctctttctgttgcccaggctggtgtgcaatggcccaatctcggctcactgcaacctccgtctcctgggatcaagcaattctcctgcctcaacctcatgagtagctgagattacagatgtgcaccaccatgcctggtcaatttttgtatctttagtagagacggggtttcaccgtgttaaccacgctggtctcgaactcctgacttcgaatgatccacccacctcggcctcccaaagtactgggattacaggcgtgagccgctgcacctggcttggcccattttaaaatcaggttttttttttttttaaagttgattatagaattcttctttttttttttttctttttgatacagagtctcactctatcgctcaggctggagtacaatggtgtgatcttggctcactgcaacctccaccttccgggttcaagcaattctcttgcttcagcctcacaagtaactgggattacagacgtgtaccaccatgcccagctaatttttgtatttttattagagatgtgatttcaccatgttggccaggctggtctcaaaccattggcctcctgtgattcactcaccttggcctccccaaatgctaggcttacaggcatgagccactgtgcctggctgaggagtcttatatctattcggactattaacatcttatcaaatatatgatttgcaaatattttctcccattctgtgtgttgccttttcactctgttgattgtgtcctttgatgcacagaaggttttgattttgatatactccagtttatctatttttgtgtttccttagcttttggtgttgtagtcaagaaatcattgccaaatgcaatgttatgaagcgttttttcctgacagttttatagctttaggtcttatatttaggtctctgatccatttcaagttcatttttgtatatgatgtaaggaaagggtccaacttcattcttttgcatgtggatatccagttttcccagtaccacgtgttgaaaaggctgtcctttccccattgaaggtcttggcacaattgttgaaaatcatttgaccatatggaagagtttatttctgggatctctattctattccagttgtctatgttttgcattctttttaaaaaatatttttagtctttacatttcagaatcagtatttcaaatgtgacttgtaggactacgtgcagtgaggaagattgttaatcatcctattctgaccaggagttctgacaactttggtgctgtaggcggtgtctaaggcaggtgtcagcaaattttcctctaaaggagctgtgtgtgtgtgtgtgtgtttgtgtgtgtgagtgaaaaagaggtgagatttattttaaatttattttaagaaattggcttacatgatggtacagtcttgcaagtcaaaaatctgcagactaggctggcagtctggagacccagggaagagttgcggtgttaagtgttaagtctgaaactagtctgaaggcagaattccctctcttcctcaagagatcttaatctgttttcttttgtttttgtttttgttttgagacagagtctcacagcccaggctggagtgcagtggcacaatcttggctcgctgcaaccttcgcctcccaggttcaagcgactctcctacctcagcctcctgagtagctgagaccacaggtgcacactaccatgcctggctaatttttgtatttttagtagatacggggttttaacatgttggctaggctggtcttgaactcctgagctcaggtgatccatctgccttggcctcccaaagtgctgggattataggcgtgagccactgcacccggcctaacaatgacattttatatacacacaggcacatacacaaacctatttataaaagatgaaatactcaagacaattacagttctgatttctgtaactggtcaggtggtcacagctcatatttgtaattacctttgtctactactcattatgtatttccattgtcctcagcaagcaccacggctggttgtgattatttatctggtggggtgacccaaacctttgatttctgaagggtctaggccagtcatagtcctgcctgaatttcgttgttagagttttccatgggctttggtcacagagcttggttaatcctgaaataccctaagggatcccttgtacttcatatgtattcttccttacttcctttgtgaagcagaagtccagtttctccttggtaatcaggatgagtggcactagccagcacaacaattcccttctttgttgattcaaaggcatgaggagcctaaaagggttagatggcagttttttgtttttatttatttatttatttatttattttttagacagagtctcactctgtcacccaggctgcagtgcagtggcgcaatctcagctcactgcaacctctgctgcccggggttcaaacaattcttctgcctcagcctccccagtagttgggattacaggtgcctgccactgtgcccagctaatttttgtattttcagtagagatggggtttcaccatcttggccaggctggtcttgaactcctgacctcgtgatccacccaccttggcctcccaaagtgctgggattacaggcatgagccaccgtgcccggcctagatggcagtcctaacttctacttcagtccaattactgctatatctactgatggaaatattcctgctgttggaactaagactgccagaccagaagagtatgagatcatggggacaggaaacacaaattttgctagttggtcaactagggatatttgtggagggctgccactcccatttctatcttttggtttctagacttgtcaaccccgactatgggagaaacagcaatatattggacactgactcagacagtatacagcctcctgaaaagccttaccccagtcctgtaaagtattaccaaatagctggtactgtaactgaatcttcaaaaggcctttccaccattctatgaaatcatctgccttaggatggcggggaacatggtaagaccaccaaattccatgagcatgggcccattgctgcatttcctttgctatgaagtgagttccttggtcagaagcgatgttgtttggaatactatgatagtggttaaggcattttgtgattttacagagggaacttttgacagaagcattgcatgcagtgtaagcaaatctgtatccagagtaagcatctgttctagtcaggacaaaacactggcccttccatgatggaggggattcagtgtaatcaacctgccaccaggtagctacctgatcactgtggggaatggtaccatagtggagactcagtgttggtctctgctgagggtagattgggcactcagtggtggccatagttaggttggtcttggtgaatgggagttcatgtggccaaacccatgcgtaaccttcatccctgccatcatggccacttcgtttataatcccattgggcaatgacagaaaaatgagcctgactgtacatatgaaacaggtcaccctatccactttgtcataaaaatcctcctctgctgagtgggcattcacatggccacaaatgtctttacctttttttttttttggggctgatttagaggggtctatctataagtccatctatctcttcccaaggcttccttgtcaccaattttccaatcatgctccttccacattactgaccagccaaaccattgaccacggcctataaattggtatataattgtatatctggccatatgtccttccaaacaaaataaacaaccaggaacactgtcccaagctttacccactgggaggatttgtcttcaccactcttcttcagggaggtcttcagaaaggctctgtagtgcagcagttgtccacttctgggtggtatgtgcatgttttgtagaaccatctgtaaaccaggcctgagtcttctctttttccatcatctgattgaagggaaccccccatgagccataggtgcagctgggatagagaaagcagtgtagcaggagtgggggccgtggacatttgagccacttcttcatgtgacttagttgtgtcttcagatcatgttctggctgtgtaggcttaactttacagctgggctggtaagataacacccagttcatgaagggcagcttaggttacatggtaacttggtgtcctatggttaagcctttagtctccactaatgcccagtagcaggccaacagctgtttctcaaaaggagggtagttaactacagaggatagcagggctttgctccaatatcctaaaggcctatgctgcaacttaccaatgggggcctgcaaaaagctccaaaagacattactgtctgctactgacacttcaagcattattggttcttttttttttaatttttttatttttcgagacagggtctcgccctgtttcccaggctggagtgcagtggcatgatcctggctcactgcagccgctgtctcccaggttcaagcaattctcatgcctcagcctcctgagtagctgggattacaggggtgcactaccatactcagctaatttttgtatttttagtagagacggggtttcaccacgttgactaggctggtcttgaactcctgacctcaagtgatctatctgcctcagcctcccagagtgctgggattacaggcatgagccaccacacctggctgcatcattggttcttgcagaatcatgtgaccatagaggcagagaaatttatgttgcagcctggacctgttgcagaagcttctgttgttttgggatccactcaaaactacagcttttcaggtcattaatgtagcacatgagctgggtgtttgaatccctgagctaattttccccctactttgttcagtgaaattaggtgcaactagacagtctcattatacttgttagtttgacaaaatgtttgaaggtatcatacatgttaacccagaaccttgccttttatacttatttaatttaaagtatctgggctgggcgttgtgggatcccagcactttgggaggccaaggtgggtggatcacctgaggtcaggagttcgagagtggcctggccaacatggtgaaatcccatctgtactaaaaatacaaaaagcaattagctagtgttcttttgattactcgtaattaatgcctttaaatctagttagtttagagtaccaatttcagaaaccaaccccagaactaattcagaaaatttattcttaagatctggttcaggtagagctactcttgctaccgaaatctgtgtgtgttagggttctccagaaaaacaaaatgaactaacaggatgtgtatagtctcagtctctgtttctctttctcagaattggtcatgtggttatggaggctggctagtccaaaatcttcagagcaggctatggattcagggaagagttgatgttgtagctctagaccaagggcagtctggagagaatttcatcttctttttctttggtttgttttctcttatgggtttcaattgaatggatgaggtccacccatattaaagaaggtatctgctttactcaaagtctactgatttaaatgttaatcccatctcaaaacatgccatcgtggcaccatccaggttaatgtttgaccaaatatctgggtaccatggcctagccccattgacacataagatcactatcacagtcagataacaaatgtttagctttgtgggtcatatggtttatgttacaactactcaactgtgtggttgtagtcatagacaatacataaacaaatggctgtggctgtgttccaagaacactttatttatagatactaaaatttgaacttcatataatgttcacatcataaaataaacttttccttggatcctttcctcctttcctcctctccccctttcccccacccaccatgtaaaaaaaaaaaaaaaaaaaaaaagtaccacagccagttgcaatggtaggtacctgtgcatatcactatgcctgtaatcccacctacttgagaggctgaggcaggaggatcacttgagcccaggactgcaaggttatattgtgctataattaaacctgtgatcgtgccactgcactccagcctgtgcaatatagaaaggccccatctctttaaaaaaaaaatatacaggcagcaggcaggatttggcatagtttgctgaccgtcaagggctctcttttctaaaacataggcatggtaagaatatgtgcaaaggccatgggtgaagagctttttattttgttgcttgtgttccagttggtgcattctcaagagtaggtactttcttttcttgttcattctcttcctgagcctatcttgggattttctaagaaggttgctattagtctagtctttttccagctgctccctagattgaggcgggagaggagaaattcagcaaagatttctctctcctcatcaaggctgtcccttgcctgctttcctgtgggacagatggtgcatgtaggcaaaaggctggaacatgttggctgctcctgttacttggtgctttgagcagaaaggcctgttgggttagttcctgggctccagtgctcaatgtgtgtgtgtcctgttttgtgtttttacccatctttctgccttggctttaggtttatatgtttgcatttataaaaacttcttatggaatagaattataatgaagaggagcagcaaagagttgtggttgagagctggcagtactggaatcagaatgcttggcttgaatctgggctcaaatgcttgagagctgtgtgactttgagtacggttcttttcttttctgggcatcagtttcctaatctgtaaaagggatggaaatagggccaggcatggttccttatgcctgtaatcccaggtactcagaaggctgaggtgggaggatagcttcagcctaggaggtcgaggctgcagtgacccatgattgtgccactgcactctagcctgggtaacagagtgagaccctgtctctaaaaaaaataaaaagaaaagatggaaatgaaatagtaactcacacggtttttttgttttgttttgtttttttgagacgaagtcttggaatctcactctatcacccagactagagtgcagtgatgtaatcatggctcgttgtagccttgacttcctgtgctcaagcaattttcctgtcccaacttcctgagtggctggagctacaggcacgtgctaccatgcccagctaatttttgtatttttagtagagatggggtctccctatgttatgcaggctagtctctaactccaaggctcaggtgatccctctgctcagcctcccaaaatattgggattataggcatgagcctgcagtggccatcacatggtttttattttttgttttttatttatttttaattttttatggatctagtcctgaatccagaacatgatttttaaatgaactaatgttaaagtacttagaaaagtatctgctgcatagtaaggatatgtggttgtacaataaataaaaataaagagagctgctcacatagagtgcagatttcaaaccatctagtctttctcgttttattacattgaatttctgcttctgaatttttaattttgttataagaaggatgttagtccctctaaagtatcatttccaatattttgtttatgttccataaattttaaggttattttacttcaaattattttataatgtatatgccttttatatttgttttagttatatcaaaatgcagctttcaaaaatattttagtgtgtataattatttcagattactattagtagaagtgcttttttaaaagacaaatattatatttaagagaccctgccacaaaagtactcctcatggaagggaagatggactggggatgatgtggcagttatacagggaaaacttcacattattttgtatttaaaacataacctgaggctgggtgcggtggctcacgcctgtaatcccagcactttgggaggcagaggcaagtggatcacgaggtcaggagttcaagaccagcctgcccactatggtgaatccccgtctctactaaaaatacaaaaattagctgggcatggtgacatgcacctgtagtcccagctgcttgggaggctgaggtagagaattgcctgaacccgggaggcggaggttgcagtgagctgagatcgtgctattgcactccagcctgggcaacagagtgagactctgtctcaaaaagaaaaaaaccaaaacagaaaaacataacctaattttatattttgttttgtcatacagttgtatttgttttaaaatatctttccaccccttccaaaagtattttatccaagtagcagcacatcttatttccatgtctgggttggactttatttatacttgtctgaaactaaggaaaaagaaagtaatttatatcagttaaaagacctctacttctcaataagttagggggcggaggaatgggtctcaatctaccactcacttttctgctagaatttttttttatattgatacctcccattctttttttattttattttatttattattattatactttaagttttagggtacatgtgcacaatgtgcagattagttacataggtatacatgtgccatgctgtagaatttcttaatgttgcatcagtgtttcacaatgtaatcgaaaactcaaaatagcaatcttccttttttattttattttattttatttatgttttgagatggagtctcactctgtcgctcaggctggacagtgcagtggcatgatcttggctcactgcaacctccagctcccaggttcgagtgattctcctgcctcagcctcctgagtagctgggactacagatgcatgccaccatgcccagttaatttttgtatttttagtatagacggggtttcatcatgttggccaggatggtctgaatctcctgacctcgtgatctgcccgcctcggcttcccaaagtgctgggattacaggtgtgagccaccgcacctggcctcagaacagtttatatttaaaaattatttcaaagataggagagagttcccatgtgtctcatatgtttcccctattaacatgttacgcttgtttcattgatgtaccaatattggtacatttttattaactgaaatttatactttatccagatgtctttggtttttctaaaataccctttttctgttccaggatctcacccaggaaatcacagtacagctagtactcatgtgtctcaaggttgttcttggttgtgacattttctcactttgttttgatgaccttgacagttttggggattactggtcgaatgtttgtagaatgtccctcaattagggtttttaaaaactgatttataattcacatagtataaaatttacccttttaaaatatataattcagtgcttttgagtatattcacaacgtttcccaaccatcctatggttggaaaattagataacctactaattccacaaaatccagaatattttgatcatcccagaaagaaacctcataaccaacagcaattactctcctttcactcctctcccatcccctgaaaatcactaatctgctttctgtctatatggatttgcctattctttttttttttttttttttttttttttttgagatagagtctcactctctcacctaggctggagtgcagtggcgcaatctcggctcattgcaacctccgtctcctgggttcaagtgatcctcctgcctcagcctcctgagtagctgggattgcaggcacgtgccaccacacccggctattttttgtatttttagtagagacaaggttttgccatgtcggccaggctggtcttgaactcctgaccttaggtgatccacctgcctcggcctcccaaagtgctgggattacaggcgtgagccaccacacttggcctggatttgccaatccttaacagaacatataaaaagaaccataaaaacgcctgacatgttgcctcatgtctgcaatcccagtactttgggaggccaaagtgggatgattttttgagtgtaggagttggagacctctctgggcaacatagttagaccaggtctctacaaaaaaataaaaaaattacctgggcatggtggtgcatgcctgtagtcccagctactaaggaagctgaggtgggaggattacttgagcccaggagatggaggctgcagtaagccatgattgtgccaatgcactccagcctgggtgacagagtgacactctatctcaaaacaaacaaacaaaaaaccccataatatgtggcctttttctgtctagctgctttcactcagcataatgttgtcagggttcttccatgttgtttcatgaatcaacactccattcctttttatagcagaatgatattccattgtaccatgccatagttgtttcctttttcttttctttctttctttttttttttggagaacgggtctcactctgttgcccaggctaaagtgcaatggtgtaatcatagttcactgcagcctcaacctccctggctcaagcagtcctcccacctcagtttgggtagctgggactagaggtgcacaccactatgcctaactaattaaaaaaaaatttttagtagaaatggagtcttgctatcagggagatcttggactcctgagttcaagcaatcctctcgccttggcttccaaaagtgttgggactgcaggcatgagccattgcacctggcctcacattttgtttattcattcatcagttgatgagcatttgagttgtttccagtttttaactttttttttttttgagacggagtctcactctgtcacccaggctggagtgcaatggcagggtcttggctcactgcaacctccgcctcctgggttcaagcgattctcccacctcagcctcccaagtagctgggactacaggtgcgtgccctcacacccggctaatttttgtatttttagtagagatggggtttcactgtgttggccaggctggtctcgaactcctgacctcgtgatcagccagcctcagcctcctaaagtgctgggattacagtcatgagccaccaccagttttttagctattataaataaggctgctatgaaaatgcatatacatgtttttgcattaagatatgttctcatttcttttttttttttttttttttttggtgacaggttttgctccatcacccaggcggagtgcagtggtgccatcacagcttactgcagtctccacctctcaggctcaagtgattctcctacctcagcctcccgagtagctgggaccagaggtgtgcaacaccacatttggcttttttattttttattttgtagagacgagtcttgctatgttgcccaggctggtctcgaactcctggattcaagcgatctgcctgcctcagcctcccaaaggattgggattacaggcttgagcccctgtgcccggcccctatgttttccttttttttttttttaaatttgaaacggagtcctgctctgtcgcccaggctggagtgcagtggtgcaatctccctcaccgcgacctctgcctcccgggctcaagggagtctttagtctcagtcccaagcagctgggactgcaggcgcccgccaccatgcctggctaatttttgtattttttagtagagacagagttttaccatgttggtcaggctgatcacgaacctcctgatctcaggtgatccacctgtctcggcctcccaaagtgctgatattacaggcgtgtgaaccaccgtgcctggccgttttcatttctttgtgatctgcttaggagtagaattgtaggtcatatggtaacttcagggttaacatttgtaagcattgccaaactcttccactgtggctgtgctgtttcacatcccaatcagcagtgttagagggttccaatttctccacctcctccacaacccttgtcattgtctttttaattctagccccaagtggcatctcattgtggttttcatttgtacttctctaatgacttaacgattgtgtcttttcatgtgcttattggccattggtatttaagaactattttaatcctttgcccattaaaaaaaaatgtttttgtccttttattgttgaatagtaacacttttttttttttttgagacagtctcactctattacccaggctagagtgcagtggcgtgatctgggcttactgcaatctctgcctcctgggttcaagggattctcctgcctcagcctcccgagtagctgggactacagacatgtgccaccatgcccagctaattttcatacttctaataaagacggggtttcaccacgttggccagaatagtctcgaactgctggcctcaagtgatctgcctgcctcagtctcccaaagtgctgggattacacttatgagtcactgcgcccagccaagtactaacacttctttatacattctggatactacactcctagtagctttatgtttagcaaatattttctcccattctcttggctgtcttttcactttcttaatgtcccttgaatcgaaaacttttatgtaactgtgatgaagttcagtttatttattatttttggttgcttttgttttaggtgtcatatctaagaaactgttgcctaattcaaggttacacggatttatatatatacacacatatatttatacatgtatacataagtatacatggaatatatgtgtaaaatatacacatacacaaatgttatatatcacatttatacataggtatatatgtgtacctgtatacatatataacatgtatatatatgttctataacaagtgacttatattttattgatctattttgagttaatttttgtacatggtatgatgcaagggttctgattagtttttctagtctcctttgtctattctgtacagaatagttttattgcagttttagtgtcctttaagtacataaccttaagtgtttggcttggggataaatgtagactttgggaaaattgaattgttgggagacctatcagggtctactagcatgtcatagtggagtttagtggcaatgtctccttctctgtatcttcactccccagttgtaggatatgttgaatcagacctattattaactaacataaaatataagtgagcctaatggcagttctctttagattttctgtaaagcccaggacacccattgtgacctctcagactccaaagcgaatttcctaatggagtagaacaaacaggaaattatgaggaaaggcagtcagagtttgaaaagagaacacaccagaaacaatggaagataggtccaagaaactagataagtgcgagttgagaattgaatataattttatttaattttaataatactttaattgtaaaagtaattcataatcactgcaaaaagtaccaagcactgtaaaaattaaaaatacaaaacaatctcaaattgtgacagccaagagaaacctaaagaaacatgattataatgtttgtggcatgtaagtttggtgtccacaatggaaaaaggatattaggaaaaaaaagaaatataagatatagaaattagttaaaacaatgagaataaaaaatgaacacccaattcctgctcctagaagaagtagtactctaacatttggtgaagttctaagagccaacatttttacccagcttatactaggacctgttctaaatagtattttagctcatttaattgttaagccattgtataaagtaaacagaatcccttcttttgttacagattaggaatttaatgcacagagggttagataacttgctcaaagtaacattgtggtcaagagtcaaagctagaatttgaatcaaaagagcctgagtccaaaggcatggttttcatcactggactataatggtgtgtattctttcataattttttcagtgtaaaactgaacatacagtatgcttttattttatttatttttttgagatggagtcttgccctgtcaccaggctggagtgcagtggtgtgatctcagctcactgcaacctccgcctcccacgttcaagcaattctcctgcctcagcctcccgagtagctaagattacaggcatgtgccatcacgcccagctaatttttctgttttttgtagagatgggtttcaccatgttggccaggatggtctcgatctcctgacctcgtgatctgcccacctcggcctcccaaagtgctgggaatacaggcgtaagccactgtgcccagcctacattttatttttcgattgactcccgtgatcagagtcaacttcccatgttattttatgtgaatatgtatcaatgaactattagaaattgcaatgtttttgtaggtcaaaacaattcaatattgacaattttatatgattcagcctaatacatcattttttccatcagccatattgcatgttattatttatatatacgtttatttagttagcctatctgttctctgtgaggaacattacacagtttctgagattttgttacgatagaagtcagcattgataagcctctgcgcacctgttttaatgtaggatcattgggaactgagcagtagcttacagggcttgggaggggatttaaccatttagtcaacctccactcacatcaccctcccttcttcgataatgggcaattgagaaagggcaaatgtgtgtaaaaactatgcagatgcagtttcaggattattttcttcttttctgcagtgtcttttcccaagctacatcagcgtctaaattttggagttactgatgcttccgttatttctgcagatagaatattatgtcgtaaataatgtttacttgtccattagtattatataaaagtgcctgtttctccccactccagctatcattgattattggtaaaaattttaatgtatccaattctaataggcaaagaaaggctctcctacttagatcttaggtgggggtctaagttcatatttttgttttacaaaaattgaatagccagtgtttttgagttgaatgatctatccattccgtataggagagtttaattatattgtgattttgggggagataattttcacaatttaccccctcaaaatgtagaaagtagaaaaagggtagaaaaatcgcaccaaatttgaacaatgtagcatgcttttagagttagggatattttcttttggaaggatttcaagtctggcgtatttgcattgattgtggttatggcgcatttaacttttccaaaccagcttttttgtaccgcacataggaagacctgagggtgagtgtaaattaggattgtttggccagtggtgtgtgcaaaaatttattgtagaaccaagaattatttctttagtattttacacattttaaaaaacaggtagacatgtccattgatcccaggttgcttatggtttctagaggccccctctcattgcaacagtgctgtggggccctaggggtccagtagccccctccccccaggtcattccggtgagggagggagctgggacccctgcactgcggcaaacaagcacgcctgcgcggccgcagaggcaggctggcgcgcatgctcaggcggggatgtgtgcgaagcctgccgctgctgcagcgagtctggcgcagagtggagcggccgccggagatgcctgacgcatctgtctgaggagcggtcagtgacgcgatggagcgggcaaggtcagctgtgccggtggcttctctcaagagacagcctggggagcggccacttttattcatcagatattccaagtttttaggacttggagtactgaataaacggaatttgggccctaaagtcctttgttctggagaaccagatccggaatgttcagaggcttgctgttgtgccgttctgccccgatggtatcctgtccgctcgcattggggcgcgtcccccatccgcccccaactgtggtgtcgcgacaggtcctattgcgggtgtctgcggtgggaagggcggtggtgactgggagcatgcggggtaaccgcagtgggcaagggacatgggtggaggtgggtacatcagggtgattgcagttccgtgtggcgagggtacgtggggggaccagtgcatagggattttaggcggaggtaggtatattggagtgattgtggcggggcgaaggtacgtgaagtgatcggtatttagggggtgttgagcgcaggtaggtgtataatagtgaccactgcgtggtggagcagggtacgtggggcgactggggggggaattcgtcgcagtgaccgaggcgaggaggctatggcagtggaccagggggatgagtcggtgtgacagtggtgggggttgtgttggtggtcgcggcgcggggagagtccgtaggaagtggctgggaggtagggggaaggcggcgacagtgggtattggcggcggtgggcattggcagcgggtaggcatggcggtggtggactttggcggcggtaggcatggcggcggtgggcatggcatggaggcggtgggcatggcggccgcggggcctgtcgctgtccggagtgactaagggacgctgaatgattgctgtgtagaggagggggcatcagaaggggcagtagcacagtccgcagcctttaattttcctgtgacctgcgatggtcatctggtttgcctactgtggtggtggtgcttttttattaaaactgcgcaatgcctacactgccgcaggggctgcagaaatgcgtggaatccttgcgtaccctttaggaaccctcgctttagaggctatggcataagaagactggaatgatgtgcagaacttgcatttacagatcttttgactgataggccaggtgatgcctgggggttacttttttttcattgtttctctctgttgggaaccaggtcttggaaggctatgtcgaaataacctgggggtctgtgttgcgtcactgccattgtgcagctccttcaagatggccgccgctgcagcggcttagatctgcgcaagcgcttcagcgggggggtggccgcttcctccctgtagagccgccagtggggagggggcaggtggtgtgtgttcagcttctgctgtttcggagtttcagccgtaccctctttagggtgcagtggtaaggagaggaagccggccaaggtgggcggctgccccctccccaaagtgctgcttgggaaaggatgcaggttgcgcagacgcagcagaggtgacagtcgcctccgcttgcagtggggcgagacgtggggcaggggagcgagggcttacgcagcttttgcctggaaggaatggcagccctccccttcacctggctgatacagcagctgttcctttccggttgtggcgcagtagaggggggaggagggagatgggttggcgcaggctccgcctagcaagcttggcagccaccccttacccacggtgcagcagtagaggactggaggggaatgtggctagaggccaggcatttgtaccacctccgcctgtgtgggatggcagctgcactgggctactgcttttcagctctgcagtaaactagagtggtggcggcctggaggccatcaaaggtgcagccaccccaagacctgctgtgctgtttcagcaagcctccattaatgatagagattttaaattggttttctgactccctggaaaatcgtaccttttcatttttgtagttcctctcttggttgtattgtgcgctaattctctattttcaaactggacttgttaaccccttttttttaactccctgtagtctttgatttccattcgacacatttaataaatgtcaccatttaagattcagttatccttcttaatctctggatagtccattctgatgcactgcatactttccttaaatgggttgggggagaggacatcgtgatggctcttcccgactaaggttgaaaggtgtttcaaacactggacctcttcatcttctgggagttgaaagctgcaagttttgtgctcaaagagaataaaagagaaaagtggagacaatcttattggggtggggttgtgctttggatcagttactgtctttttttggatttttaaattaatgatcatttttgaagttggagctactacaaaaatttggtgagaaaggttaatgaataactgcatttttatattccagtacttttttaaaaaatcattttattctaaggattttgtcttcctttgcaggattttcagtgcttgccttttctgtatttacattttccctctatcataactggtatgtctggttgcactgagttgtaattaacagaaaagttaaatctacgaagcccgaaaagccttgttctggaataatctatttttgggtagttttaaaaatagcaggagtctgggattttatatgatatttataatttacccttttttttctgcttgcatgaagatagcagttcacatacatatatttcttggtttaacttctggtcatttggctatttgcaagctgagtatttagtctgatccgccattttgtagtcttgcattcaggcccgggatcctaatatggcagatccctttggaaaggcctcttgaagtttcaaggtctgtgtcctactcagtgaattggctctgtgctagggctttttggaggcagggagtggcagcccttcctgtgatgcagaggaaggaagcttggttgagagacccttatgttgttgtctaaggcagggtactaactgatttggatttattcacagaccttgccttatcttgatttcactattctatctgaccagtgtgtcattgccgaaatgttttccacatttatagttactctgtatctttatgtttcccttaccctgttccttttcctaataaacatctttgttttacaaaaaattttgtttataaggtgtcaaggatgccaagataacctcctttgtttatcagcgccctctgtttagctattttttaggaagaatcatttaagcaggttgtgagtactgccctcaattacttggacaatgaagttttaaaaatcttatttagacctgtcactggtcctgtctcctttttttttttttttgtggcccagggccagaaagcttgagtgagaattgttactacttaaggtagcctctctccatttctggatgctagctggctcaaagttttttttttttttttttttttttttttttttttaaatagaccagggtctccctatgttgtccaggctgaactcgaactgctagactcaagctatatcctctccctcctcagtctctctctggccactgtggctggcccaaattctctttttgttaattctcctcagatttgttttggaggcaatgaggtttcttatattcatggggtacagattagcagcctatcattaaccttatttttttgtttttaggagacagggtctggctatgttgcccaggttggagtgcagtgatgcagttatagctccctgtaacctcaaactcctggatcaatctagactcctgcctcagcctcccaagtgcctgttagtacaggcttgaggtactgtgcccagctaactttttatttttttgtagagaggggtctccttatgttgcccagactggtctcgaactcctggactcaagcagtgcccctgcctaggcctcccaaagtgctggcattgcagccatgagccgctatacctggccaactttgtttatttttattcttgagatcttagttaaattttatggaaaatttaggccgtaataaaattgggattccattgctttttgcttttcaatatatttccggattattactttcagtgtaagtgatctgagggcaaacatttaacaccctttctatatgatgattttttcatgatgtcctcagtttcataaaatgttggtttctgtgttggggatgcagttagataaatgcatgtgtgtgtgtatctagaacattcaataaagtagtgttttcaaaatcttatagatgacattttatatgtagattaaaaataagtagatttaagccaggtgcggtggctcatgtctatagtcccagcacttttggaggccaaggcagaaggatcactggagcctgggagttcaagcttgggtattgagaccccgtctctacatttaaaaaaaggtaaattcagaaagttgaaataatagaatattttggtttgatggctatttcctcagttgacctcagacctttcatattgagcaactgccgaatgggttctttttgttttttggtaagacagtgtttgcagttgtacactattagattaatcatggtttagttgatagtttctttaattgtattatattaaggtactacattattagctgtatttgtgtgcccaccataatgtagcactgatcagtactaaattcctttttatggctgaaagacattcgtttggatatatcatattttcttcattcgtaagttgatggacatttgagttgtttccactctttggctattatgaataatgctactaggaacacgtataatacgtttaatacaaagaattagtttcacaaggttttacttagccctcgtatatgccaggttcttgaaattttgtctttttggaagtatgagagtagtggtagctgggaaggctgcaggtataatagaaagaacatgaactgtctgggcatggtggctcatgcctgtaatcccagcactttgggaggccgaggtgggtagatcacctgagggcaggagctcgacatcagcctggccaacatggtgaaaccctgtctctactataaatacaaaaattagctgggtgtggtggtgcatgcctgtaatcccagctactttggaggctgagtttgggtcttgtaatattacttcatctagcagtagagttagtgtcatatgttactttcatgattaacatttttaggaagttggcaaagtctatatataacactttatgtttccaccagcagtttccccacatcctttacaaatattgtggtgtcagatggtggcatttcagtgggggttttttcattttgaggcagggtctggctctgtcacccaggctggtgtgccagtggcatgatctcaggtcactgcaacctctgcctcctaggctcaagcgccctctcaccttagcctcctgagtagctggtaccacaggcatgcaccaccacacccagctaatttttgtatttttttgtatagatgttgcccaagctggtctcctgagctcaagtgatcgctggcctcagccttccatgaaccattgcgccctgcctcattgggattttgatttgcattttttagtgactaatgttcagcatcatttcatatagattagccacttgtatgtgtttggaggactgtctattcaagtgttttacccatcgtagcaatagaatttgcccttttattgttgagttgtgagagttccttacatattctggataccaaacttgaaaaaatacttttttgaggtgtgagtgacatacaaaagctgtagatagttaatgttaaaagttgatatgctaagagataagtacatgcctttgaaatcattcttatcaaaattagtggcataaatgtgtctgtcacctgaaaaagtttctttgcctctccctaccttcttttttttcattgtttggattttctttttgtttgttttggatactagaaacttagctgtatgttaagcaaatattttttcctattctggttatcctttcactttctttagtgttttcggaactttattttttgatgaagtccactttattttttatactgcttgtaattcaggtgttatatttaatagaccattgtgtaatcaaaagtaataaacattatcagtgtataaaattttaccatttagaaatcaaatatgtgtgtatggcttgattagaacatttaaactcttgaaagaataaaacagctgtgcgttattggtaagctattttaccaatctaaaagtctaacatgacttaaaaacatctagggttcagagaattattaatagcttttggcatgtatctttgaattttgcttttgagatattacttgtgttactttagtgaaaggtcctgctgacctttctgatttatcatctttaaaggttcataggtggtttctgcagtccctaatatggctagtctggtgtgggatttcatgttctgttcccttgagcagccattttatgaggggttctgcagacgtaacatggcgggttttttgtttgtttgtttgtttttgctatgtggatagtttttagcttgagcagctcttctattgctttgcaaatcctaaagaaagcaccatttgcatgtttttttaaagtagatattttataatttaaactatgttctattccactatataagtatgtctactgtatcctaaaaatattttttgaaaccattttggaaatcaggtttactgtttttggggggaaggtgagtagggtagtggtggtatgtatgtatctacatctgcataagtgggaattttatatgtacgtgactacaaatagaggtagatatattattttaatttcattttctgattttttttaaaaccagattttctgatgtcatgggcttctaaaaggagaaaaaagtggttatagcatagattatgactgtttgaaggttaaagatcttgtaataattttaccttgttttaattagatttaaaaatccattatattaaatgtagttctaaatataaccttgacaaatagttatttcatagattgatgcagtctaccaaacaaatgcctctcttttctgtttcagggatcgcttacacctgagacgaactacagaacagcacgtaccagaggtggaagtccaagtcaaacgcagaaggactgcctcactgagcaaccaagagtgagtacagactgtgttgggaacaaatgcaagtcagaatctcctttcagattagaacaaaatatcatgcaatgaggggattaaaatgaacataattgaagaagcagacacatctaatacagaagatgtagtaaaaaagcaatgaaattcttaaccatattatcctaaaataattcaccctcttaaagattttagtataattttcttttttcctatacgtgggtaagtgcattttatctttataaaattttgtaattacccttcaacataagcatacttaaatttttctgcattattaaatcactttgtatgcttgcaaaatgtactgtgcgctgaagtgattaatttacatattcattcttgctctgtgatatttaggtgtttgtttttggttagtgcatttattctgttaaaatttaaaatacatttgtgttttttatcctgttttaagtatatatatgtggaatgtatatataggatgtatacacagacacactcagacacatattttaatttagatttctagaagggaaattttaattaaaaataggtgaacattttaaatgacctaatacatatttagtccacattgaaactttggcattttgtcattgccattaaaattttgatggcattaaaatttgatgccattaaaattttgatcagtaggtagcatttttttcttagctacaattgttttttttaattataagtattaaaaattcatgaagatgattctttttgtaaaacagttttgcataaaaagtaagtctcattttaaagcaactaccaacttaactggccttttcctccccagagataatcattaagtaaatagccatcagaccttgtcctatgcattgtgtgtgtagtggggagagaggaagggaggacatgggacacatttgaagtttgtgtgcatacgacaccgtgctgtctgtattttgacaatatgtcttggtgatcttttcatatcagtacacataaatctaccttattttacaaagtgtgcgtggtgtgataacattattattgtaatcgttagcttgctgctggatatttagtttgtttgcattgtttggctattaacaatgaaaagaacagtcactttgaaaacgcagtgtaggccaggcatggtggcccatgcctgtaatcccagcactttgggaggctaagccaggcggatcacaaggtcaggagttcgagaccagcctggccaacatggtgaaaccccgtctctcctaaaaatacaaaaattaaccgagtgtggtggcacgtgcctgtaatcccagctacttgggaggctgaggcaggagaattgtttgagcccaggagacggaggttgcaatgagctaagatggcaccactgcactctagcctgggtgacagagcaagactccatctcaggaaaaaaaaaaaaagaaaatgcagtgtatgaatactaatttattttatttttttcaaattaaaggtttttcctcatagtaaaaactgagtagtagtttgtgtgtcttttgttatttcctcattttatatgtgaaaagttgagctggatgtggtggctcatgcctctaatcccagcatgttgggaggctgaggtggatcacttgagcccaggaggtggagaccagcctgggcaacatagagagacctcctctctacagaaaaataaattagccaggcgtggtgttgtctacctgtagtctcagctacctgggaggctgaagtggaagggtcacttgatcccaggaggttgaggctgcagtgagccatgtttgtgccactgtactccagtctaggtgacagaatgagatctagtctcaaaaagaaaaaaaaagttgtaaaacatctgttagcaagttttaaattatggtgagggtaaagattttttttttattttttcctatttattttgccgatttttactatagtgagtatatttaagtacattttcattttttaaaattgctttggaagacgtattttatgtacgttttgtttgtatattggtaaatattttgaaagtattttgtgtaatataatttgtcctttatatataataggttattcgatcattcattttatttgatatgaaatctcttttttcatctcttcattctttttgagacggagttttgctcttgttgcccaggatggagtgcaacctccgcctaccaagttcaagtgattctcctgcctcagtctcccaagtaactgggattataggtgtgtgccaccatgcctggctaattttgtatttttttagtagagacagggtttctccatgttggtcaggctgggctcgaactcccgacctcagatgatccgcccgccttggtttctttcccaaagtgctaggattacaggtgtgagccactgcgcccagcctctcccttcattcttttgcagctctgacgtttttttaaagtgccattactattccctgagtttctagaggtagttcagagatggtggtggaggtagggctgaggtttaggactcttaggtttaggactgttaagtgggtgaaggttctatcttgctatatttttgttacagtttttttcctatgtaacctcagtgtggactaaataacaggtagtctcatcctcatcttgttgtgggatgacgttagccttctaggcatcttgtccatatttatggaaacattttgatggttttgaagaagaaataacttgagtttttcttatctgcactgcatatatatgtacaaatactgcagggtcttgagttgggggaatgatctgagtaaagtgtagagttagggaaatagtataatttttcccccttgtgcgttttcattttgagagtaattggattatggaatgggtaagcaggattggttaacactgcctcattgtccatgtgtttaggattctcaggattggtatacttagaatgttatactagaagtgttcaatatttacccattcatctcctacttcctaccaaatcataagtagtattgggaggcagtcttcctggaggagttgtgtggttattagccctaaagatcaatgaaggaggctgggtgcggtggctcacgcctgtaatcccagcactttgggaggcgaaggtgggcagatcacctgaggtcaggagttcaagaccagcctggccaacatggtgaaacctcatctctagaaaaataaaaaaatcagccgggtgtggtagtgtgcacctgtaatcccagctactcaggaggctgaggtggaagaatcgcttgaacctgggaggcaaaggttgcagtgagccgagatggtgccattggctgtgcctgggtgacatagcaagactccatctcaaaataaagtaaaaataaaaagttcactgatttattttaaattttttattctgtctttcagtgtatttgtcactaaattagctcttattctttggggctggatgatgtatcgtgagttcgaagggaaattggaaattggagctggagagttgtcttaatatattttatgctaagcttcacatgtcttttcaaattaatattctgcactctatgaattaaattctgtgtaggctgcctcattttctcagtctttaatcttctattgggttacaggttagatctgagggggacattgcaatagagaattatcttacgtttcaagataacattatatatatttttttttactgaaacactttttagacctttatgaataataatcagaaacttagttgtcatttgtaaacagaggttagagtggagaatgcccaaattaagatttatttattcagtgattagactatgaattagagtataaagtagactatgaattagagtgtgaagatttagaggtatgtgcagtgcaattctgactacttggagttagtgcaaatttcacagttgtctagatgccctccagaacattcccctcaatgcagacaccaactccaagctccagggttggcagggcacccacacttccgaccaacagtctatagattctgaggtcctactattttctcagactttataattgactaaggttttataaatgactagtagatctcaagaaagtgctatacttactagttttttttataaaggatacaaatgaacagatgcatagagcaaaatctgggcaggtcccacacaaatcttccctgtcctcaggatgcattacctgcacattagcgtatatcaccaatcaggaagctcaccagaactccagatgtcgatgatttttgttggggattcattatgttgacaagattgaatcactggacatgtcactgaattcagtcagcaactctcctgccctcccaggagggcttgctcaaaaccccaaccctttagtctttgtttgatcttttgtggcctggttagtcaccatcttgagacatctcattaccaagaactcaggtgtgatcctagggacccaccttgagtaacaaacacatttctttcactgggtaaattccaaggatgtataggatgtataggttacttcccaggaaccaggagcaaaggccagttaaattctttattatacagaagcaattttaaaatgttactgaaaaaccatagaaaaaagtccaatttccaaatccttacatgccaacaagggcagcattgttggtgatcccccagctcctcacctcaaggcaagctgtcatttcctgtatgtcttccttctcatcatcagatttcacagccaggttactgattcataggggtatgtcgagggcttttgtctggaattccctgcttaccagtagatgattggtttacatattttaagagcccttaaatagccctggaagttctatatttcaggtagtgacttgtcaggaggatcaatatgaaggacggcctaaacatctccctgcaaatgctttagcagcatctccctcccctcacccctggggagaaaggattgttcacacaggataatttgaaagtgagtgactatatatggtactgatggtgtttcttcaaggctgccagctcttgtgtttttagttcttttggaaatatttctagacttggtaagtatcttaagtatccactagtcccttgtacaatctctgtgtagagattcctgttttgtgttataatttctcataagatagtgtcatcctctgaccctaaagaaagatcttcttccctgggcgtggtggctcacgcttgtaatcccagcactttgggaggccaaagtgggtggatcacctgaggtcatgagttccagatcagcctggccaacatggtgaaaccccatctctactaaaaatacaaaaaaattagccgagagtggtggcaggcacctgtagtctcagctactcgggaggctgacactggagaatggcgtgaacccaggaggcggagcttgcagtgagcccagatcgtgccactgcactccagcctgggcgacagagtgagactctgtcttaaaaaaaaaaaaaaaaattagctgggtgtggtggtaggtgcctgtaatcccagctacttgggaggctgaggcaggagaatcacttgaaccccgaaggcagtgtttgtggtgagcagaaattgcttcattgcactccagcctgggcaacagaatgagaccctgtctggaaaaaaaaaaaaaaaaaaaaggaatatcttcttaaatgtaagggtacctagttttctttcatatggtttcctataaagacaaatgtatttttatcatttatatatattgtgctcttgttgtaggtgtcagttgtacccgaggcgttctcagcagcagcaagtacctgtggtggatttccaggctgaactgaggcaggcattcttagctgagacaccaagaggtggttaaagccatattggagtagcgaggaatctgattccaagcaaaaaccaggttagagctaatgcagcaatgatcaagaataaagaatcattaaagaatggggtgttgggggttctcttaattatcagtgacacattaatttttttccttagagcttcatacaataaacacattgcagaaagttttagaaagttttgcaggaccttaaattttctgccctgacactttcgtcatgtttctgtattccagttattgtagcgcatgcttttcaggtagttttcttttgcgttttttttaattatataaaaatatttcactataaatggctcttgaataccctgttactgaatgtttataatttccttttgtgggaggtgtcatttttttctgccagtagtttgaacaaagctttagtagatagctttgtataaaacttagaataattttttcaaatatgcagatgtgaaaataaattgaatcaaggaatatgaacttaaggtacatttttctaaattatattgcaaagtattaaattagtattcattgctttcgaaaaataaagggccagttacaacatactttcacagcattattttaattcaaatatggtttatgtcagtgaattataaatacacagcacataattaacaatgagtattagagaatctaaatactttctcatgcttatttactaattcctttttgttttgtctttttctcacttttctgttttaaccaatgtatttcctctttgaatcagcagacaatgtaataaaaatattattcataatttttcaatgtgatgtagatttatttagttctttttatgttgctttcattttttaggaaaaagttattacaaagtcgattttgatttgttttcttgtttttcctctgtgatttttctttttttctactttaagttttagaatgccctcatttctgagagtttactatttactttttacaaagtaagagcagagaggaattgggtttactgataaattccttctagcctttttttaagtctgtttttgaagtattatccttcaacttgaatcagttaggcttgtttatggccaccattttgagttattaattaatttatttatttagagatgaagtttcactctgttgcccaggctggagtgcagtggtatggtttcggctcactgcaacctctgcctcccaggttcaactgattttcctgcctcagcctcccaagtatctgggattataggcacccaccaccacacctggctaatttttgtatttttggtagagacggggtttcaccatgttctccaggctggtctcaaactcctgaactcaggtgatccacctgccttggcctctcaaagtgctgggattacaggcgtgacctaccgcgcccggcccattttgagtttaaatcaaaggagacagaaattttctgagaaatcctcctttcttgaatcctttatacacaacattttctagcaattgcataagcaaattggaatctaatcattgtccaaagcttttcccttgagtaagggaatttttcattgaataggtgtgcacaactgattttttactttttaggaattttttagcttctcagttcagttcacagatttttgtaaatttttaaatacaacatttaagtcatacattatagtctgcaagtaggaccatctaattttatgatacttaattatatcttattctagtctcaactgctagttctacctaaatagtacccattactagtattcctgtagaagaagggttggtaatatatctggaccactacctgtgtctataaatgaaattttattggaacacaactcagttcatttattatgttatctttggccacattggtgctacggtggtgcagctttgagtagttgtgacagattgaatgacaggcaaagcctaaaatacttagtatcttgctatttaaaagaaaataattggctgagttttattttagaggagcagattgaaagaagaaaacaccaaagtgggggccagtcaatatagtcataatgtcatagaaggtgataaagaatagattatagaagtatatacgaagtatacattacagcgtagacaatcagatgaatttcttggggaagggatcagtctaagagtcatgttaaagtctgctgtggaggaagatgggtagtctttaacaacatttaaacacttcgtacccgttttcattaaaaatgtaaggcacacgatggccaggaaaaataagaaaataaactattaatgtggccgggtgtggtggctcacgcctgtcatcctagcacttggggaggctgaggcaggtggatcacctgaggtcagaagttcgagaccaacctggccacatggcgaaaccccatctgttctaaaaatacaaatattagccgggtgtagtgggggacacctgtaatcccagctactcgggaggctgaggcaggagaatttcttgaaccctaggggcagaggttgcattgagcagagattgtgccactgcgcttcagcctgcgtgacagagcaagacttctatctcaaaaaaaaattgtgttatgaatattctgtttttctttggtacctaaatatttaccagggtacatatccaactggatacctacctagtagttgggatgcagggtgtaatattagtatgacttttaaacgtttttgttacattgttttctaaacacatcatgagaagtgctgatggccactaaaaattagtagaccattagtttctcagtaccaccctttgtattctggtgtttttttgtttttgttaaataaacctttccaataaaggaaatttgttttcttgtgtttttaattggaattattgtgtattaatattttgcatttagttttcttttgtcacttgtttttgcatactcttcgatggaggatctctatggagaccctctataattttaaattttaacagatcaatactgatattccatggtgtgtctcatttgctatgtgtgccttggccaaccctagtcatcttattttactatttgctatgtgtgctttggccaaccctagtcatcttattttacttttgaattaaagtagatttacatttttatgtagtttaatcatttgaaagtctacagtttcctaaagtttgaaaacttgtgcttctgtgagggataccagttcgttaatttgcttatgtgccctttgatctcagaagatacactatgactgctcatccatccttgcagtgtgatgttgctactctcgtcgcctttctcatgaagttttgttttcttgtgctgtaaagataaatttgaccactctgcagtgatttattttcttctttcacttacaaggtcatgactacattgtatcacatttagggatgagagagaactgtttctaaattccaaatctgtctcttaagggaatccttttaactgctgtaggaggtcaactcctattgtgagtaaaacatatatctcttctagctatacaggttattattatattatgatatatatataaatataaaataataatctgtccctaattctctaggtcttcagttctttgggccataactcacatccctagatgtgtttcatacctctggaccgctaagcttgtgggagttatttatatcctattgctcaaggtcattgccaaggtctgatttttcacaaaaaaattccaacctctggcataaatgggttaaaaacggctttagtgatgtagtgctgataaacataaaattcacccaatttaagtgcatgaagcaatgatttaagtaaatttacagaactgtgcaatcattgccatgaactactctggaaacattttcatcaccacagtaagatctgtcttgctcattcacagtcatgatccttgttgtctctttggatggctgaaggtcccaagtgttgcagtgctataaaaatggatattgctggctgggcgcagtggctcatgcctgtaatcctagcacttggggaggctgaggccggcaggtcacctgaagtcaggagttcgagactagcctggccaacgtagcgaaattccttctctgctaaaaatacaaaaattagccgggtgtggtggcgggcgcctgtaatcctagctactcaggaggctgaggcaggagaaccacttgaacccgggaagtggaggctgcagtgagccgagatcactccattgcactccagcctgggcaacagagtgagactctgtctcaaaaaaaaaaaaaaaaggatattgctaatgagtctcatataccatgttttcttggatttagactgctttataaagaatcataagataatattcaaaacttctaagttatagtccttaaactcttactcatatttaggacagaaactacatttaatttttgtggaggtctttgtttgcttatttgaaaagttcttttgagatctttataggttttatttaatacattttttaatgtacagacatcagattcatggccactgaatgacagccaggcattagagtattctttttttttttttttttttgagatggagtttcactcttgctgcccaggctggagtgcaatggtgcgatctccgctcaaaaagatacttttgaatccttttcaaaagtaatttgtgtttcattttttaattagtatgataagcacttcaagaccctttacaattctggctagatttggttgccatatttaatagcattttataaataatggagaaaagggaaacattatgcatgcttgattacggtcatgagctgcattaacaattccgttcaacaacagactgcatatgtcagagcagtcccttaagattacaaaaccatgttttcattgtgccttctctctcttccccaccacccccaaccctgagatggagtcttgctctgttgcccaggctggagtacagtggtgccatctcagctcactgcaaactctgcctcctggtttcaagcgattctcctgcctcagcctcctgagtagctgggattacaggcgcctgccaccacacccagctaatgtttgtatttttagtagagatagggttttcgccatgttggccaggctggtcttgaattcttgacctcaggtgatccgcccacctcggtttcccaaagtgttgggattatgggcgtgagccaccacacccagcctcttctctgtttaacattgtattgtgagtgttcatagtatgcaggatagtaacatgatatacaggtttgtagcctaggatctaccatattgcctaagagtatagtagactctgtgtatcctctaggtttgtgtaagtacactgttcatactgtgatgaaatcaccaaatgcatttctcctaatgtgtccccattacgtgacttatttatttattttgagatgaagttttgctcttgtccctccttgttgcccaggctggagtgcagtggcgcgatctcagctcactgcaacctctgcctcccaggttcaagcgattctcctacctcagcctctcaagtagctgggattacaggcacccaccaccatgcctggctaatttttttgtatttctagcagagacgggatttcaccatgttggccaggctggtctcgaactcttgacctcaggtgatccacctgccttggcctcccctggtgctgggattacaggcgtgagccacctcacccggccgttaacgtgatttataactttgtccttcattacttgatctatgaaagttgtttatgtgagtctatatatatatattccatagtcatgtgttctcttttgacatgggaagtcttaggcaggtttataacacacttggctcttagtggggaaagattacctgccatcatcttgaagcgaatttaggggaagaaagaatattgcaaatgacaacataggtatttcagaaaaaaggaaaaatctgaatgaaagagtaattgagatgttgatacagagatgacttcatattaattctgaactagagagagagacactaccttaaataaggatggaaagaaaaatactaaatttgggaaaatgacgcttagtttttgaaacatttaggaattactaggtaaaataaaattcaatgactttcatcagtcctaagtgtgtcaaatgtgagagttaagaatgagggactagggaaatgtggcagtcccttggtgaggaagctagtatgagaggaaggatgtttttgaacgtgtctgtcatagtgattttcatgcaaaattgtctgcctgttttaaaacatggtagattgcagtgcagctttaacatgctttcctctgcaggctccatctactctttgaagcttctgcccagcttgcattgtttctaggagaacctgcgtcatacctttatctatagccttcccctaggtcttcagaagcatcaagttttaactgtggacattggatttggtggaacagcaatcatggtaagctgtatgataaggctgagggttgaaatgtgctgtaagggccgaaagaaatagtttgccagcatgtgcagtgatcttgggttctgaatgttagaaataaggatacatccatggatatggattctcattgcattgagtatcagctgaagatgagctgatttttttatttttatttttttcagacggggtcttgctctgtctcccagtctggagtgcagtggtgcggtcttggctcactgcaaccctgggttcaagagattctcgtgcctcagcctctttattagaaacagggtttcactgtgttggccaggctggtctcaggctcctgacctctggtgatccacccacctcggcctcccaaagtgctgggattacaggcatgagatgagccactgtgcctggccatgagaaatgtttcatgatgtgagaaaatacaggagtttttggtcatgattccaccagtggtgaaggactgtcctgcagatgatggactctcaggtcagattacaatagaaataaagagggctttgaaaatggaagggttttggcattaacagtacagagaaaagcagtctggagagagagaacaccctacatcattgtggtttggtttacttaggggagtggacagtttagagcatgcatcgtcacagagaaggataatcacctgtaaggaggtgaaaattggttcttgagatgtgaaaaaatacttcataatcctttgtggtcctccaaagagccatactaaatatggaagaatgttggtgaaaaaggagagaatatttgtttagttaaggaaaccaggcttagattatgtaagggtggagaagaaacaggagaagattagaagactagggtgttggcaagctgaacatgactcttgtcttactgcttctagactgttggcaagagtagcaagatgctgcagcacattgactatagaatgagatgtatcctgcaagatggccgaatcttcattggcacctttaaggcttttgacaagcatatgaatttgatcctctgtgattgtgatgagttcagaaagatcaagtaaggctgatttgggcaaatgggggttggacacagaggcagtgggaagggaaggccagagctggagtaagggatttccgagggtaactgaagtagttagggaaactatggtagagccagtctattgtttaacctcttgacctgatctctgaattaggtcagagtctgcatctgaactcttttaagtttgtaaaacaatcatggatttattactgggagtaaaagtatatgctatggtcagaatactcgtatttatttttaaaattgagaaaaatgctatattaattaattggttggcttctgcagcagtcttagaccaaatcttggttgaaatggagaagaacagttgttcttcatggttgaggagttgggatatggttgccatttggtatcctctctttgcctatcactgttcccattatttcagttctgtgtcacctgtcattatgatttaattatttaagtaattttttaaagaaatttccattttaatgtggaaacccaggtttcaattttgtttttcttaaaaggtatttcacaaaagaaattagtcttgttgtagtgtaacatcaaaggaacattctgtaaaagactaaagttagattagaaaatagcttcactatttacccttgtatattaactgtgtttacagatattttttggcttgtttttcagtgataactcagtaaatgtttagcatcagttgtcttaattgatacttgaggttgtataaatattttgatgagtgagtgatcactaaaatttatctcactaaaatttaattctgatttgtaggccaaagaatgcgaagcaaccagagcgtgaagaaaagcgggttttgggtctggtgttgctgcgtggggagaacttggtatccatgactgtggaggggccaccccccaaagatgtaaggaagatgtagggcaggacagaactttaatttgcagggacatcatattatgtgagatgtctgaaatcagggtagagcagacacagttcaacatggattgtcaaataaaatgtgccaggcacttaatatcaattgttggttgcctatgctattcgggattaggggatttttggtgaattattctatgtgctgggcattacctaggtaagggtaggagttggtgattcatgtttgcttggtatgtttataaaagaggtgttttcacaatttgacaaataatgtgcattttatacacaagatacctccatggtatacttgcttgtttgttcatttggacacagaactaatatgagataggtgtcatgggaaaatggtggagagaagtgatctctgatgaataagaatactgagaacttgtaaattgtttgattttaggctatgaattttcttgtttcagactggcattgctcgggtaccacttgctggagctgctggaggccctggggttggtagggcagctggtagaggagtaccagctggtgtgccaattccccaggcccctgctggattggcaggccctgtccgaggagttgggggaccatcccagcaggtgaggaaccagcagagggttttatattattgggagaatatgactaagccggaggccgaggagatttaaaaacctaagtgtatgtgtcatacaatgtaaacagcatatggtttaggaggaaccaaaacacagatatatgggaggaagggaataaaactagctgcttaaaatggtcattgggtgattaaagttacccaggttactcttggcaagagtaacttgccactagtggtgagtgaacagaatgcatggatataccacagttgaaaagaccaaagggctttttggatgtcagtgtactaagattagtttttaaaatatgggaataggccgggtgcagtggcttacgcctgtaatccagcactttgggaggccgaggtgggcagatcacttgaggtcaggagttcgacaccagcccggcccacgtggtgaaaaccctatctctactaaaaatacaaaaatcagctgtgtgtggtggtgggtgcctgtaatcccagctaccaggcagggagacaggagaatcgcttgaacccaggagtgggaggctgcagtgagctgagattgcgccattacactccagcctgggtgacaagagtgaaactgtctcaaaaaaaaacatgggaataatgagagaagtacattgcaacagttgtttgtaactaattggtcatttttctcatttattttctgtgtttgaataatgtgaaggtttgcatcgctttgactgtttcccgccctgccttctcaggtaatgactccacagggaagaggcactgtagcagctgctgctgttgctgcgactgccagtattgctggagccccaacacagtacccaccaggacggggcactccgcccccacccgtcggcagagcaaccccacctccaggtaagggattggtgaacacgaagacgaacttgaatctctgatgagagatagcttactgatttaagacacagcctgagagcctaagaatttggggaatatgcttccttcttctagatactggtttttaatgaaagacatagaagagtaattgtcatatagaagttatttgactctatcattgttgtctggcccatttctttagggattatttgggctaaattctaacttttctaagccattttatgaggcctttatttctaccatttttcactgtaggcattatggctcctccacctggtatgagaccacccatgggcccaccaattgggcttccccctgctcgagggacgccaataggcatgccgcctccgggaatgagaccccctccaccaggcattagaggtgagtgggagcataggggtttgatggttcagccaggcccctgaatatgtgtatcctctttttctcaatgtttctatttcctttccaggtccacctcccccaggaatgcgtccaccaagaccttagcatactgttgatccatctcagtcactttttcccctgcaatgcgtcttgtgaaattgtgtagagtgtttgtgagctttttgttccctcattctgcattaataatagctaataataaatgcatagagcaattaaactgtgaggtactgttgtatatatttttttgcctgttgattttgatgagatcttaagttactgtggatgagggtgatgcctattaagcagttgattcaaatcatattctctttaattcttaggataaaaaggttttctgctatctaactttcactttgtgcattgactggtgttggttaataatgttttcatgacccgggggtttaagtggttgtgctgcttcacacatggcctcctgcttctcatgttgctatgtcacattatctgaagggaagtggggatgggatgaaaggccttgtaaggccacctatatactgaaggaagttgtagtgaatcacagtccatgctcattacatatcaaggcatttgaaatagaagttactctttttcttgggatgttgacctcagttgatcaggttttacagtgtcctatgatcagaatagaggatgtgatactggaataatcattttctaccattgagtaagtatttatttataaattactaaatgagtggaagatcctgggtactgggaggcaggaggttgcatatttgagttgataagttgtactactgataataaagataactgacacactaaaacatacttggtacactgaaatacaaattacggttatgtccagtggtatcaccaagtgacaaactgggagctaaatagttcagaaatgccctagtctctaggtccagtttgaattggttatggaacaaagaagccatttataaaagggaagagatttttaggttttgcagctaaggtttatagtaggcagcgagggaatgattcatagtgattgtagcagttggtttaccaagcactaaagagattggtgttaactccataatactgatagactgattggaattacattttttctcttgaatttaccaggagtggttgtgaatgtcaccttttccatcttttaaattacatccttgcaggtggtaatcactcaaggaaaaggaattatcagagtaacaatagttcctgttactgacttgatatggtctctgccagaatagcttctcagattaatggccactctcaggtaaggaaaataaagaggcgaagccttagttgctttaggagatgatataatacaggtgtgacatcagtgttttcagaatttgtaaatgttaaaacaaacttcttgatttaccaaagccacaaccaaagtactttacctggatctttcaagacagagcttctcagttcagacaaattgactgatgataagacaaacacttttcctctacaaaccgtggggtagtatgtagagagacctgtgatttcttcccatactgctctggaactacttctaattatacttttttctttgtttgtttttgaaggggaagcatttctccttgcattggtttgctggtatggatggcccttagattttggcatgagtgattatgcagcctatttgaagaaaacctgttttcaggacctttttaattaaatatggcctgttacatgagttaaaggtaagttataagagctctagattctgcaagatgcttgcttcttgtagttattttgcttggtgataatacattttcttttgtctggagcttcctggactttttgagaatcctgattgtgatgatataataggagaaaacttgggatatagatagtataattgagtgtggtgaatcttttgttatggaatgctagtctaagcttctgtgtgtttccactagggacacacatcaacatatcagtcttaaaacattcttggtagttaatgcttgatgttacttaaaaatcatcctacattcttgcattaaactacatacacgtggctgggcgcggtggctcatgcctgtaatcccagcactttgggaggccgaggcaggcagatcccgaggtcagaagatcgagaccatcctggctaacacggtgaaacctcgtctctacaaaaaattcaaaaaattagccgggcgtggtggcaggcacctgtagtcccagctactcgggagcctgaggcaggagaatggtgtgaacctggtggagcttgcagtgagccgagatcgcgccactgcactccagcctgggcgacagagtaaaactctgtctcaaaaaaaaagaaaaaaaaaaaaaaaagaaaatacatacatgtctcatctaaaacatggttggtcaacaactttctgatttcctgatacacattttattaaccggctccttaaatatatccatgttgcatatcatgtttgacatgctttcattgtagcttatagaataatttcaaatagaattttgggataaaaattatgctaccttaaaataggttatgaagtatttgaggtattctctttttatatgataggtaaacttggcttggaattaaaaagattttgaaagttgcttagggagctccctgcttttgtgaactcattattccttaattatgatgtcaaatttcagaagtttgttattaacataccggtattttgctttttatagattcttgtaatagaatattacaagtagaaactgatttacatagataattatgtgaaatagtgctgcttgactaggattttcatgatctcatttcaaagattagcaaaaacaccctttacctggtatgtttacctctgatactaccttcactgatttcagcaggtagtcagttataatccatggattgaagttttgatttatttatttatttatttgagacagagtctcactctgttgcgcaagctggagtacagtggtgtgatcttggctcactttagcctctgccttccgggctgaagcgattctcctgcctcagcctcctgagtagctgggattacaggtgtgggccaccacacctggctaatttttgtatttttggtagagacagggtttcaccatgttggccaggttggtctcaaactcctgacctcaggtgatccgcccaactcagcctcccgaagtgctgggattacaggtgtgagccaccgcaccccgccatgggttgaagtttttaaatgcatgttttccggtagttaatacattgcttgattctgtcttataattgcatttcagttctcttcatcttgtccatacacataataatgcttagtatataataaagcaaggtatattttcatgggatttttgtagtgggagaatgacatctgagcctgaaataggatatttgtgttgtaactttttcagtgtcatacgataccattttttgaccacttagttgatgcctctgaaaggaagagagaatcagatcgctaaaatttgatgtgtcgtcagtgtggatcctactcagtagtgtcacaacgaggctgaaaatcatattaagtgcttttaggacagaaacgtaaactgctcaggtaaaataaccttataaagagaaataagcatatattgcagaggccttggctaggttcatgatgacacaggaccttgtctgaacataatgatttcaaaatttgagcttaaaaatgacactctgaaatccagtcagtgtgcctcactagacttttcgatttcaagattttctgcagaaaatgttttgaaaactttgaatacttaaaaatggcaggtgtagtattgcactttgctagttgctcagatacccttttttatttgtatagatattctgagttcctttttttttctacatgttgtacgttgtcgaaagctaaaaggaaacttatccttggatcacggaaggcagaggcatttggtgagatggaaacaaggatgtgtaaaaatgagacgaccacctctcggattaaaaaaaaaaagtgccagagttctagggttctaagtgatgtccaggaaggaggaggaataatatttatggagcatatattatggaacacagtgagtatagtacctgcctttaaatgaatactgttggttttttaggacagttgcttttttttcttttttcttcagctgtgtgcagttgattaacttgtacagagcctatcacacaatagatgtttaagaaatattaagtgaatgaatgaggcagcattgctaatttttgtatagtgagacagtatctcacagtccaggctggagttcagtggcattaacataactcactgcagccttgaacacctgagctcaaacgatcctttcaccttatcctccagagtagctgggactacagtcgcgtgtcaacatgcctggctaattttagttttctaatttttttagagttgggatctcactatgttgcttagactggtcttgaactcctggcctcatgccatcctcttgcctcagctggtattgtaggtgtgagccactgtgccaggtactaattttttttatgttagaaaacaagtttttaggtattttatagttacttccttatgacaatatctcatcagaatctaggcctatctgatatctgactccatacgtttataccgtgtagtcagccattcccagatagaggtcatttgagttacttagtgtttaccagcacttgtttactaccttgcgatgatatttacagtgtatttttgggtatggttttggggttatttggttgttgttaaaatgcctgtaatcccggcactttgggaggttgaggcgggtggatcacctgaggtcaggagttcgagcccagcctggccaacatggcgaaaccctacctctactaaaaatacaaaaattagcctggcgtggtggcaggcacctgtaatcccaactacgcaggaggctaaggcaggagaattgcttgaacccgggaggcggaggttgcagtgagccgagatcgcgccaatggcactccattcagcttgagtgacagaggtgagactcccatctcaaggtaaaaaaaaaaaatagaaatcagcaactgctatttgagtttacaggagtgagaagtcctctcttgcatggtgagatggggaacatttaattcaatagaaatatttgagaccaggtatggtggctcaagcctgtaatcccagcactttgggaggctgagttgggtggatcacctgacatcaggagtttgagactagcctggccaacatagcaataccctgtctcaaagatacaaaaattacccaagcttggtggtgtgtgtctgtaatcccagctactcaggaggctgaggcaggagaatcacttgaacctgggcggcaaaggttgcagtgagccgagaccatgccactgcactccagcctgggtgacagagtgagactccgtctggaaaaaaaaagaaaaaaatgagatataaagttcaaaggatgtatttattaagccaatataaagtaaagaggtggggaatgttgtagaagtatatgttgataaagggatcaggtggttgtacaataagaagggggttgcagacatggagaaacagttcttctagctcttccactttcagtatcatctgtgtgggtcactggaatcctttttcacaatgcctgcttgcccatgagttttaagaactagtacagtgtagaaatgattagtaggaaaaacttggctgggttaatttgctttgctgagccgattcaacttaaaaagcgaggtccatactaagtgcccaagaatcaagaaggaggctcacatttgaacttgatgtttagttaatgtgaatcattttctgttgaactaatgagaatacagtgaccttgagggttaggttgtacatctgaattgttcgggctgtttcctgtcttttggatgttttgtttgtatagatattttcattttatgttacatcatttgttctttggtagcaaaaattgagttgaaatgatacagttcctgaaatctatgatttcatgtttcggagatatgtatcaggaataatagtgtgggttctcatgagaaaatctggattgcattactgtgctactttggtttcttgtcagagaagttagtagtttagacctccttcagaatcctttctttggactttgtgtttcttacgttgtgccagccttgattttatttgtctgtcctctgtctttctataccatttgtttacacttaactctagaattttttgatgcatgttttcagtgtactctagtcctaaaattggtttacatttaattattggggagaatagcaagttgtcgatagtatctgtggtggcattagtgtatttctgtttcagttctttggacagtttgctagtggaaatagtcattgtatttagctctgtgagacccgactggcagattgctgtctctctctctctctctctctctctctgtgtgtgtgtgtgtgtgtgtgtgtgtgtgtgtgtgtgtatgcgcgcccgcgtttgtttccttcatgtagattgctgtgtgtgtctttttcttcataattccccttaattctgtgtgctttgaatgacactgttgttgttactgttgttttatatccattgtcacataaaactcttatcatttattcttccaggccagggactgtccttatgggtagagatacactatctgcaggaatttatttttttacgtatttttactagttgatgggaaagacattgggaaagacctgggctggatttgtgatgagctgtgtttactgagcatgatgaagtaaagctcaacgtgattactctgaagtccagccttactgtcagtctaaggactcaggatacaaatactcaaaacataaattcttagactctaaatttcacatggtttttcctatcagtacaggttaaggataatggcgtgttgtaggtttttccagtgcaatacaaggaagttggttctagatcctttagtacagttaatgttttgtagagtgtgttctatgttcactgcattggtatgtctcatctttggcatgatcttggctcaccgcaacctccgcctcttgcattcaagcacttcttgtctcagcctccagagtagctgggattacaagcatgtgccaacatgcccggctaatttttgtatgcttttgtggagacaggctttgccatgtttgccaggttggtctctaagtgatccacccgcctcagccccacaaagtgctgggattacatgcgtgagccaccgtacccagccacacctttgcttatttctactatgcatttcaagtgatcatttcaagagaataagtacttaggagctcctatgctctttttttttttaaccctgttgcttgcatcacccggttccaaccctatatgaaagtttcatgagcatgtttctgtcactgaggcagcttctccatttggcatataattgagaaattgctagtttgtggctgagacattggtttgagaggagacgtaatttatatatttagcagaatgcttaagttacatttccagagattaatttaattctacttttaattaagttaaccctttgctgtatctttacaagacgtaggtggagatttaattttgactcttagattcagttaaggtgatgaaattggcattatatagtttttgatgctgagccccacggagattaaaagatttgctaaacaccatgcaatttttgaatcacatctctaatctcacattattctgtactctattttttgcttgtatgattgatgggtctttcattatctgtgattgacattctatgagtaggtgcttttgctttgcctataagtcgttattatgaaggaggaatggtgaataagaaggtaatttagaaaagcctatattaaatataccatgaacattgaatatagcaagatcttattctctagttgttatcttagttgataaattctgtatgtgttatgtgtttgtgtatacatatgtacatattaatgatgtgggtgttgatactgtgatcacatgacaaatgactggtttatagtgaaaagctgttggggttcagagaaatgaacattcttctaaaagtgaggtagataagttattttatagttcttgcctttgagtctctgttcttctggtagaaatgttagtgtatttataacctctcagatttgtttggttctcttagtgttcttgatccaggcagttagcgatatgttggatgaattgagaaaaatgagtttttcctttcctactaactgaattagattagaaataagcagttaagtgagaaaaatagggaattagtgccagatatgttgaggtgtagtgttgacagggggtcttttaccttcagatgtttggtgcaacttagagaatgcagtggtagttgctggcccagcccatccaaacaacctcatttgtggggtgatacttcacagatgacttaaaataaatcccctgaaaataagaatctctggaagagatgacacgtgtatgtgcgtgtgtgcacgtgtgtgcgtgtgtgcacgtgtgtgtgtgtgtgtgttttggtggagtggtaggaggagggttggcttaatgatgagaatcattatttcttgaattggatgacactttccattcctgcaaagggagcgtgaggtccagccttgctaattcatgatcaaagtaatttgctgagagtagtggaaggaatgagttagcagaagatggcaaattgcattaatgagtagtaggaggaaaacaaataagcaaattttaatgtggttggaacatgttcctgagttgtatgaagggagacaggtaaattgagagtaatgttatgattgtttcatttgttggaaataaggaaaacttgcatggtttgaattgtggaacaataggtggtgtatgttaggagtcagaattatcatttaacatgtaagtttctgttttacttcagataaagaatgtcagctacctttcccatgttagcttctataccttttcttgaggtgaccataaataggtaatattgtctttcactgagattgttttaattagcgaagtgtgctgattaaatgtcttttcttgataaattattagaatgaataaaggatggtatttctagatagccttggttagtcagtgatttgtttaaatttagtgtggataagaatcacctgagggctttttaaacacagtttactgggtcctgaccttagtgtttctggcttattaggtataagtatgagaagttgatttttatcaagtttctagatgctacagatctaggaaccatacttagagtgctattatatgtcttttaatgtacactgatatggaaaaagcaatgatacatcatgttatcgcatattttaaaatgtgatcatgaccagggaatcttgaaagttgtcttatgtaataatgtaaatcaatgtagaataccatatatttttttcttgcaaggttattattaataggaatgactatttgtagccaatgtgttcaaatgcatgggaggacgtaaacacttcataatttcctggaaatacagacatatatcacttaaaataatacatttctaatataaatttaaattatctacgtgatatgaggaaacgagcttatttttgataattttcctagcagtgaatcaactatactcatttgaatctaaattaaattaaatttgagtaaattcagccatttctaaattcagtccatataaattcactttgggtaaaagaagacaaaattcctgaaaacagtagattaaaaaaataacattttaagagcaggtatgatctcaatgaatatagtgtggtaatttctgcctaatacctacccttttggaggaaggaaaggtaatcctgtttgtgtttaatgttaattactgaactctttataacttgttttatttatttattgtttgattttaagcatctgcttctggtggacttacatatgttgggtttgggaaatttcaacatacaggttggcattccagtggctatagttgtttcttgaaatttagtactgttttccaatgatgattctctttgggaataggctgttctcttttacttaaaaactgtaaaattagccacttcagttgagactcctccaggtttggaagtggtgaagaatatggatatattcagatcaaatcagtcattctctgtgatacagcaactgaacaagaaacccagacttcaaacaagcagacttctttgggttggactgaataaaatgagaagaaattacagaggatttgaaaatgtatatggcctaggaattattgaaattattttggagggtggcaacaaatttgggacattgtactttctgttttaatgtcaattgtataatgtgtaactctagtgagcatggctggataccgtggcttcacattttaggtagactgggtgttttatctactgagtgaattacagccttcggcaatgatgtcaaggtagcaacaaaacccaaaaaatccatcctttagaaattgttttaagtcacaatgatgataccttctttaaaagctttgacttactgaaataatgcttttcatttgtccaagatgagtacatagcagaatttggaaatatggttccaaaaggctaaatagactgacttttttgatatttttcccttatagggagaaagaaacattaacggtttatcagatgccttgactgtactttttactgctttgtcttcaaggcctagtgtaataattaacatctagtatgtgtttgatggatagccaatttttgcttcattggtatgttgttaccacagtcattggtagagtcaatatatgaatgaagaaagtataacaaatttgccctctagtagagtacaggcaaagtatggccgtcagtttcaccctgattttttttcctccattcttttttagggtttaggtcaagaacaagggcatttcattgtaccacatagctgagagtagggaattgggacatactgtcttgctttaaattaaagttgtctgtttcatcaagtagagaggttcctaagatattgccagatttctgactcggggtttgttaaaaatagaaaaggtagttccttaaggttgtattttattggatgcctccacctgcttcaggctagctcactggagaataaatattccaggttaaaaaaaaaaaagcatgtgttcacgtgaacttgtcctttgagcaaacctgttggaaatcaagaggtcattgctgttggagaggataagagggtgtacttgttggtgtgttaagagtagttcacaacataaaaataaatgtaaatgcatctattatatttgggttggcaaaatatattggttatttactctgttgattcctgtagtgtacataaatatgatctacaactctgtgaacaaaaaggcttgaaaaattgttctgaaaatggacaaatcatgaacagataattgaacaagaaaataagcagaaagtaaatttgtgaaatatttcaaactcatttacattcagaaacatctttttaagatcactgtgatacattcgactgtcaattctgaagagacgtataaaggaaatgccagctaaggagcaaggaaacagctttcattcatgggctaaattgcagcttaaaaaagatggaccaggattatttcctttagaaacttactgtacaaaagatactgttcaccccattagagaactgatttgaagttactcttccctgtgagggctctgtcatcttaactgtattcacatactttcaactgttccccttgctgctaacctcaggttctttagttcatctatctggcagagctgatttggggaaaacaagacaaaccttctcaggttttcttaataaataagcagttgtcatgtttcaagagttttagaaatgagcaataatcaaggaagaggacaacgattgcatacgtttataatatttagaacatcttttgccacaataaacactggaaaccacccacttgtggacaccaaacatttggatttgtatattttgtggcattccctcactctaatcctctcatccttaaaaattttcagaaatttttgcagcaacaaacactgattgcaacatatgatttagggtagatttatgaaccattttttcactgaaatacatcaacaggagtgagtagtctgagtgaccaccccagcatggagaaaactgtagtttacagattcttctggagcatttttatttctagattgcggtggaagtctaaccccccttggagatgtctgccttaaagggtctttggccagggtcctctgtagagccatagtccagatctactctatttgtgtgctccttacaacatcagaacagcaactctcaatccggattcatccccagaatgccgtctgagtcacagcgtggcaggtgcataaagaattatctactgaattgagaaacatttcaaatatataaaacttgaaatattttgggtagtctgtacaaactcaagttgacaagccaaccctgcaggaatatatggatagaaggggaaggataacatgttgaattcagctacatgcctcatcagctagaaaaccttggaagaaagaaagatagattgatacttgcctgaacttcatcaaccaataatattttttttcttgctatggagagtccactcgcctttggaagatttaccagtaaaagccctgcacatgatatacttgtgtgcacatgcaataaggacatcattccccaactcctgctagcattgtgaaagagctccaaatattcaaataatataaactttttttcgtggacatttagcttacgagtttgtttaaatatgtgggaaaattatgtttagataatagtattgaaatgagaatgtaagatacacattgaatgataaatgtgtatgaattgttcattgtgccttaggtaagccagacagtgaaattaaatgtgtaatagttgtatttttttgcataatcttggaatgtaattagttaaaagcaaacacttagattttgaacatgaatctgttaagcttgttaatgtagttgctgtggctaaataactggtttcctggggaagcttctatttgctagaattttattctggaacagttgttagaaaggaattctcaggtcaccttttaaagatatacacaattctgtattcactttttgagtgcataagggtaatagaaaatgacatgggaagcgttaattagaaaaaaaggcattttgtttatgtgcatttgaggatacagtgtttgaagtttctaaataattgttttatgacattttcttggtacatagatattgctaacaattagtttgctgaagtatgtagaaacattttaagaaatgattttagaaatataattgttaaagtacctctgatgtatattaaaaatccttttattttggtttatattgctatggatgtttttctgggggaacttaatgtatacaacttctaactaagaagttttattaatgctgctttatgtatgaaagtcatggatgtggatgttattttgtcagtggtctttctgttaaaatttacgtggtgtaagattttcttttcatgatggaattgccaaaaaggccagcctctagaacacttacatgttaagggttgggtgggatttgtattactttgtgtatataaccgacaggattgtgttactgaatcttaaccagcatagagatggctgacattttgcattttgggggacattaaattgttacacaatgatgtcattggttactgataggagtgtttagactcttagatggctttgttagtattaggcaaatattagatgtggatttaggagataagagggtggggtgttggagccctgtgtgcacatgagcatatgttgcagggcctccagacctaaatccacgtgaagatggtggtggtggtcttacctatatgttaacattacattgtaaacaggtagactactttccttttgctagtgggagtgttaaatcacctctcagaacattaattcattaaattgcccctaaacattaattgattgctggtggatatgctaaatatttttaacatctatttttctaaatgtatagatgtcatttttaattcataggggatagaaccagttttgcttgcaaaaagcaaactgttcactggatcattgggcttaatttttaggttgtggtagatataatagaaatgttcttacaatttgtagtataatactgtatatctctataaatatatatgtgactgtttttctgatagatgcaacatggtggaaatgtcatcataaatgtcggtctgcctttgtttatagttttcagatgtgtatatgcagttttttatacaacagaaaaattgccacatgagtcaaatagcataggttagaaaagttctcatttgccaaaaatatgtgactttcataatagtgagttgtttttgatttaaaatgtttctatctgtagaggcattttataagtttttatggggatactagcaatgggatgtgaaacctgagttcattagatcattgggtgataatggaacccttatgtgtatacaatatacatggttatatgttttttaaagcataggagctattatgtctgcatggttctaaatatatatacacacacgtaaacacatatctatatatctatctatatagatagatagataaatacatacatatgtagtgaaagcttttgtttcctccctcacataggcagattatttgtgtgtgtaaatgagcagctgaaggggaattttgttacatgtgtataagacagtcacaatatataattgttttgctttaattgtttagtctttgatttgtaggaattgccaacacgtatatttgtgtgtatgcaggtttatatataaatacatatcactgtataaacaacatttattgtcataggatagaaatattcttaagttgccagagatactgtatggctgctaaatgtatagtagaaaaatgttaccttttgctttttagcatctgcatacagattactaataggcgtatattgtgaccagtaaaccactagacaagggcataaacactttagtttgatcagtagaattgctatgccatgtttaaatgggatttatttggttgatgcagaatatataattgtatctagaagataaatattacaaaaatattttaatatacaatttctgtcatatttttggaaatatatttttattcaaaagtagaatcattgttgccaatagagttagcatctttgtgtgcttgtgaggtttgattttgagggttttcttggttttgttttgggttctggagttctaaaaaatgagattgtctttgtctaaacaatttttatataaaaatgtacatttttgtattattttttcttattccaacctaatcggtggcttgtcccttcctgtgtttattgggctgttgggtgcctggatagagctggagaccatttaactgctgtatgaataatagataagcgtcttgaataacatctgaatttcctaggtatgtagaaacacccaccatgcacatatatgaacatacagaatatatgaatgttaaaatatggtgaaaacaatcttttgctaatagaagtgttaacctttatttttaaaaaaaatttggtgtgtatgtagaggtttatttgattgttagttgtgtccatgtataatatgtcatctacctttacagatgtgcagaaatttgttgtatttggtggatatattttacttaaaactatagggcagaagctttttatgtttgttgaagtgaaatggcataccaaacctgtgtggtagagtgggatttttagattgctgtgtgtacagtcaggttatatctttaaaatacctattcgttatatattaatatgtagacattgctgatacatatgtatgtaaaaatcagagtatttttattaatataggcattagcttcttgattcacttgtttgttgggaagcacttggagaaggatgttgaatactttgtcatttcatctctgtgacgtacagttgtcatgtcaaccctcctatctgcgggttttgcatctgcaagcacatgcagctggaaagtacagcattggcagaatctgaaacccgagtaaagagcacctcattttcataaccatgggttctgaagagctaagggagttgaggatgcaccgattttggtatgggggtacggtacaggtacaaatccccgatggatatcactagacaactgtacaatcctctttagctttttttttgttttatagacagtgtggacgtgcatatattgcaagcatcactttgttaaactatgcttaaccctgcaaatgattttaagagctctgtgtgggtggctttcttgggtttactattaaatatctgtgtttatcatagttgttctataacatttcaactttgtaaatatgtagtttgttgataaagaggatagagacatttttcttttgttgatagattgttctttcccctttgcttagtcttcattgtgttgctgggattgtaaaagacaaattacttgcacatatttaagcttatatattaaatgtatatatgctgtcatgttagagagggagagtggttccctcccccacattttgatttaaaagtaaaaattaatttttattaaattgtttgggtcagtttcatgtaagaataatctctacattgaatggtatatcttggccgggtgcggaggctcacgcctgtaatcccagcactttgggaggccgaaggggccagatcacgaggtcaggagttcgaaaccagcctggccaatatggtgaaaccccgtctctactaaaaatacaaaaactagccggccgtggtagtgcacatctgtaatcccagctactcggcagtctgaggcagaagaatagcttgaacccaggaggcagaagttgcagtgagccaagatcgcgccactgcactccagcctgggcgacagagtgagactccctctcaaaaaaaaaaaggtatatcttattttctttgatgtactgaggttcatgatgcaattcattcttaagcatatactatagaatctttaaattatatggttctgtgttcatttgtggcatgacagtaaccaagacaatttagtaaataatcagcaaatgaaatatttaattttgaacatctagtatttctagatgtatagagagtctcacgaagtagattttttaagtatcttgttgtaaatttgttagtactgttgtcttttgcaattaatgtggcaatgaaattgattattgatacacaggctcttggagctaaacaaaatttatcgtgttttaatttggatattagaaggaggaaatgaaaagagactctctacattttacctgttattatatagcttaccattatatcagatatgaattgctttttttaaaaaacttagattaaatgtcatgtaaatgcatttagtctttccagatacacttcttgatatcataatttttatttcctgttaatattcaagatataaatgacttcattaaagagattttctactacctctaggaactatacaatattctgtatgtgttcccttggttgcatgacaatattcaagacaactttgtaaataatagataaaaaattttaatttttaacatctagtctttctagatgtatagagtctcacaaagtataattttgtaaataagtcattgtaaaatttcatggtttcattgtgttttgcaaatgtcttggcaaagaacttgataaaattttgggcttcttgacctatacatattttggtatctctttattgggttgtttagtgtaaggaaaaagttgaaagaatgtattttcaactttgaattgtaatcagaaagaaaatatattttaaccattgtttagtgcttctgttatatattgaaaacttcagtcttaattttttagttacattgttgatagggcattatataaatatacttctatagtcattgtaggaaatgtcttttataaggaaatatttcttctacctctgaattacacagttttgtatttacttggactgcatggcaacattcaaaaaacactttgaataacagataaaaatgacattttctaaagctctaggtttgctagatgcatgaagtctcagcaaagtataaatttgtaaatatttcattgtaaaatatcataaattgactccttcaagtgttcagtagtacaataggtaatcaataattggcctcttgggactgactgtaacgttttggtgtttgtatgttttgagacagagcaatagattgcctccatatcttttaaacattcaggtctcttgtataagaaaaataaccattgtggggtttttgtgcatcttatactaatatgaaacaaacaaaaccccctggatattttatccttagaaagatagaggaagacaggagaagggaatggtcattgtaaattagatagatatattgagtgttagaagattatttaaataattgttcttttgttatttgtactctttgcaaatttatttaaatgcatattcatgtatatcataagtatatattcacatgcatgtctaaatttagtggcatagatctatctcaggggtattaatctttcattcgtgtactgatttgtgttttattttcatttaaaaaattgtggaaccagtggctgggcatggtggctcatgcctgtaatcccagcactttgggaggctgaggcgggtggatcacctgagggtcaggagttcgagaccagcctggccaacatggtgaacccccccgtctctactaaaactacaaaaattagctgggcatggtggtagatgcctgtaatcccagctactcgggaggctgagacaggagaattgcttgaaccctggaggtggaggttgcagtgagccgagattgcaccattgcactccaccctaggcaacaagagcaaaactctgtataaaaaaaaaaattaaaaaaattgtggaactagtgttttatttctaagcttgcagatatttctagaattccacttactgttacatctaaatgtatgctgatttttcgttaaataataagcaggtctgtaaacattttcttttctaacctctttccatatttatatgagtatagaaaaactgtggttatgaatattttttactttttgataacttttaaaaactatcagatatgtgataatcagatagatttcaagtttacttacggtgtaaattaggaaaatttttataaagattctatccagtattgatcaaaagtataaattgtgtgtctttttaagcagcagtttggcaatgacaatcaaattgatactatgtaaaagttttgaaatgttatagctggctactggggtttttatctattccagttctcgaaaatttaccaaatataggttggctgtaaaatcataactatctgaggtatctgtcaataaatcaaagattgcaatgatgatagcttctttaacatgaatgtaattctaacagtaaaaaatttctatatggaatatgttttgtagtcctaaattgatattttatatcatttttcagtgaacaagtagttgtttacaggtgtctgtgcatatgtctcaagtttttctaactaaaatattaatagttaagtctaaaaatatgaattatacgtggggcttgtcattctgacatttaatacttcagcgtggtgataatggtgatataatatactgtttgaaattgtaacacatgagttaaaatcaaaagattgataagtacatatttgtatattgctacatgacaaaaatctaggaagaatatgattcacatgaaaattctttggaaggacatgacagacttttaacagtcctgtatagtgaaaggagaatagaacgactacttctactttctgtatctgaaattttcaaaagctatttcaaaatgaacatttaaacaacaggaaattttagagacaaccactttgtgcctgtcttcatccttgacattcaacatcctaggaacaatgggctgttgtattcaacttcttattcccaacagccattatgaatggtttttgattgatctcacaaagagcatgtgctttagacattaatgcagcgactaccatgaaacagagtattggattacctaaggaaagaagcagaggatggaatttgaggtaggtgtcaaacagtgaaatttcgtttgagaaacagatgagtgaaagaaaatagtaactgaaacattcattctataaggagagtacattttaatactggcgatgctgtatttgtgggtactgactagatcaagatgttagaggaggtgtctcttgggataagttggaagttatccttcattaatttggtataaactgaaaacagattgcttctttccttttaaagtggttgagtctctgatgggtttaaagtaggcctttggggatttatagatcattcaaaattagcaggggaaattttaaatattctctgcatctttctaaaaggtgtggtttaaagttggtgagaaagtgaaatggttgctggttgaacttgattttctctattcactatgcctggctagcctaaaattatcctaatgggtatgttcaggtgcctgatttgtatctaaatgtttctgtattggatactgtttttcttaggcaatcaggatgagtgaaaaattgatttgcagctgacctgcaaatggaatcatcaggaacatccctttctcatggagtcccttaatttacaagttaactgcaaacataggtaagaaggttctggtgctatttgggggtgaggtattggtgaggttttgcctaagctcaggaaaataatactggtacaggtgtatttcttggccaccttggaattatcaaatgagttagtctttaaaatatattttatcgaagtgaaggtatagtttggttcccagaccaaactgagggtcgggctgctatttctcgtgccccaataatgagatgcagatgaacaggggaggaagagttagagctagttacaggaagaaggcctggaaattgtcaccacaccaactcaaaattacaaagtttttcagaacttatataccttctaagctatatgtgtacatgtaagtgtgtatctaaagacataagtgatctataactaaggtctgagtcttcgagaccttcctttggagcctcagtaaatttacattaatttaaatgggtctgggtgctgaggtgattaccattatcttgtttcctactaaatcatggaggtttggggagttcctttagaacccccaataaacttgtttgtggaggcctggagagtttcttcagacccctaataaaacttgtttaatcgtgctttaaggttcaagagaggcctaggtaaaacttggtgggcttttgtgacattccaacctttgtataacaaaatggctctttcagcttttagtatttaacttaaccactccgtcaatactgaaacagttgttatggaggcctccattagagggacctggcctgccacaggtgcgcgcgcacacacagatgagagtacctttaattagtttacttatctatggtcaaacacgacaatataactaataaaagaaatgaccaggcatctaattactagaaattataaaattgacaatatgtgtgttttcataaatgtacagttttcacaaaatgttttcacatacagttctttgataaagggtgaagttcatggaaaccacagaaagatgctgatactgtaaactattaaagtcattactgaggttgtaagttgactttgctataggattgataatgggaagtgtttctaaatgttaacataacctgtaataaagttcaacatgagcattcacttaacctgccgccttagctgtttcattagagtggtatatatctcaccttacagtgtttcttctttttccttgtcaggagatgatagttccaagaaggaacattttatcgtctttgtttttaatctcaagaatggtacctaccatcagtgaatgacctgttgcagtgctttcattgaagtgttcttcgttccctcagcaatatgattgtaagggcagttgagtgctaacttgactgggagaggggcggtttggttagacaggacttgatatattctgtttttcataagcttgatgtttttttctggcagctacttgacattcagatctgattggttacatattgctatgtaataaattatcctgaaacaggggcataaacaatattgttatgtccatggattctgttggtctgaccatgcccaggacagtttaggaattgtatcctctccaaagtttcattgtagcttctgtgtttttagtatagttactatttctttctcatcaaatagactgaactccttttgttattatcatttaaatatttaggcattgttgtcatgtatattgtgcataaatgcatgtatactgcaggtaataattctgtatgtgaacaagtgacctagaggtaaaggaatccaaatacagagacgtgtggataatgtgggagaggtcagtttttcacaagacataggaaagaggctgggcgcggtggctcctgcctgtaatcccagcacgaggccgaggtgggtgtgtcggtcacttgaggtcaagagttcaagaacagcctgaccaacatggtgaaaccccgtctctactaagaatacaaaattagctgggtgtggtagtgtaatcccagctacttgggaggctgaggcaggagaatcgcttgaacccgggaggtgaagattgcagtgagccaagatcacaccattgcactccagcctgggcaacaagagtgaaactccatctcaagaaaaacaaacaacaacaacaacaaaaaagaaggaaagagctaacatctgacctcctttattattagaatactccaaaaggaattttgatccacatgctctttcttcataatagaatgaatgttgcatgtcattttacagacaaattttattagttcttgctgatgatataaactttgcttctaaccttttcccattttcccaactgtgtctctcaggtgatgactgaaaaagggaaactgtgccactatttgtaccatcattttcaccaaaatctaaaaatgctttttatgacgtatggagacattcttcatgtttgtttcagtggacactccttgcagatgtaaaaaactgagaaaactcacttttggaaagtgacctaaagagtgtcattgaagtgaattttaagtaggcacgatgattgttttcatggttgctgttggatcatatctcaggagctggaatgacagacattattgaacaaagaaatcaggatagtggaacttaaagggcttcatctcagtgctttcataagtatgaagtgcatatatttataattttcactaatcacagggtaaatataaaattgattcattaaaaatgtttcataagaattcaaaggacatagaattttgtgaaatgtagtatttttacttaagtgccttttctctgcttctaccccacagccaattttttataaaccagttgataacataagtagtttttgggggatgatacattacttatacattttctatgtagtaaacatgtatgtgtatgtgtgtgggtgtgtgtctaattactttgttggacagattcctgtggtttggaactgctggggccaagtttatacaaaaatctacatttttgagtaaactccccatgactctagtaagtttccacagtatttgagtattctttatttcctaaagctgtacaaacatcagataatcaatatttgtaaggatcgataatataatttataatgaaattgctttatcagctattaatgttaactacatcatcttcatatagccttataactcatttgtgctattccattttcctctgttccttttattttcacttcccttgtaatgttagtctctttgtactgatttctgaagagttcatttatgattaaacatgttaacattttgtctagaattgcaaatatgttttttctcattcattttactatggtgttttattttttggttatacagaagttgtatattgaaatataatcttgttctgttttatgactttggagttttgtggttttttaaaacatgtttacattggtatcatttatttgtattgccttctatttcagcagttagtttgtcatttctttttccattaatcatcattctggtgttaatgaatgcattaaatatttaaagtactcactttgacccgtgtagttatctgttaagttctaccataaagaaaatttccaggtaaaattggctacatttctgttaacttgccttaccattttattgacactttaataattactaatgatttatactgtcttatctattccattgagttctatctcatttctcttctttttcagaatattccctctgtatacttgcatttttttctatcaattgacgcttacaattatttttgcaagttggaaaaaaatgcagtattaatttcatttgcaacaaatttaatagattaattaggagagaatagatatctttaaaattgagtcttctgtccaactgcaaggtaggtctttctatttttaatggaataataatttggggatattgctagtgcagttttttaaagtattttttaatactaggcattttttagttatttgttaatttagtgatttggattagtcattcaacttgtctaattggtatgtgaaaactttttgtatgtcttttctagtaatctttactgaatttctaaaattatgactttcttgaacaatctgtcattttaattaccttgattaaagtacatttgtaagtacttctaggatatatggaagtagaaagtatacttggcaattggactgttaattgcaatccccttaggtcatggttgtttttgttcttattggtattttagtaatcttttagaagaaagatgttttaccaaatttggtgacaggtttaataaaatttctttttgtatagttgaaaaacttgtccttataattattaaggttaaaattaacatattccaaaattgaacattattccatcccatgaatgaagtaaattatattttagtatatactccttaattatagttgttataatttcatttggaatttctgaaatgattcctaaacaaacagctttatacttgttctgttatcagaggtttttaatgttttactggctctttgaaaccattttgagtatttctgacacagactagaaacaagtaatatttttctttaattattttgaaatgttggcttaaaaaggtgttgaaataatagcgtgtttttttttttaaagttatttatcttttgtccaaaatcaactaagcatttatgcaagcatgtgttttttggaacccttttttctgtttccttgttctttgtgtttttctttatgccaatatcacactgttttgataattgtagctttgtagttaacattttgaaattgagaactgtgactcttccacctttgttctttttcaggtttattttgctcatttcagtcctttgaaactctgtatgagttttaggattttttttttaatttttgcaaaaaatgtcatgggaagtttactagggattgagtctgcacattgcatgagtattattgacataaacaatactaactcttccagtccatgaacatgggatgtctttttatttatgtcatttatttctttcagaaatggtttgtaaatttcattgtacaaaaaattttctttgatcttactggttaagttactttctaagtattgtatttttaaaatgctattgcaagtggaattgttctttgaacttcttttgtgaattgttcattgctatttttgcatgctgaatttgtagcctggtattttgtggaatttatcagttctgagatttttttttatgctcccaaggaaaattttagcccgtaataatttttttggagacatagtctcactgttgcccaggctggagtgcaatggcactatctcccaggtttgaacaattctcctgcctcagcctcctgagtaggtgggattacacgtgtctgccaccacgcctggctaatttttgtgtttttagtagagatggggtttcatcgtgttggccaggctggtctcgaactcctgagctcaagtgatcctcctcccttggcctccaaaagtgctgcaattacaggtgtgagtcactgtgcccgaccagcctataaaattttagtggatgccaagagagatacttctacttcttttctgacttgggtgtcatttctttctttttgttacttgattgctgtggcaaggatttgtaatactgtgttgaaaagaagtggcgaaagcaggcatccttgcttttgtaactgatactagaggaaatccttttagtgtttaacctttgagaataatgtttgttttgagtttttcatttatagcttttactatggtgatgtgatttcatctattcctaatttgatgaatgttgaattttttattccttagtctttgtcttgctttggtaagagggtaatgctggccccataaaatgtgttggggagtgtttcctccttgaatttcttagaaaagtttgaaaacacttgttatttgttatataagtatttatttgatggaagattttttttttttttttttttgagactgagtcacgctctgtcgccccaggctggagtgcagtggcgcgatctctgctcactgcaagctccacctcccgggttcacgccattctcctgcctcagcctcccaagtagctgggactacaggtgcccgccaccacacccggctaattttgtgtatattaagtagagatggggtttcaccatgttaggcaggatggtctcgatctcctgaccttgtgattcgcccgcctcagcctcccagagtgctgggtttacaggtgtgagccactgcgcctgaccggaagatttttcattaataattcagtactgttaatagtttcatgcgtgtggttttgttttggtggcctttagtttcctaggtttgtaggaatttgtacatttcatctagattatctaattttttaacattcacttgcttatagtactcttacaatctcttagttctgtagactttatgtttctgatggtagcaatttgagtctgccctctttttttctagtccacttagctgaagctttgtcagttttcttgatttttgtttatgaagaaccaagtggttattttgtgttcattttctgttttattcatctctatatcattctttatgtccttccttttcctctttgtgtttactttgcttgtgtaattctttaatttgtacagttggttgatttgaaattttttttcatgttacattaataggtgtaagattcataagaaaacatgttttattttcattttcattcattcccacatattttctaattttccttataacctcttggtgtactagttgtttgtgttttctcatgtccacaaatgtgtgacttttccaaggctttccttctgttactgatttctaaattcattgtcttgctgtggtcagagaagaggcttctttttctgtctgttttttcaaaatttattgagactgaatttgtgaattaactacatttgttgtgaaaaatatctcatgcacttgaaggggagtgtgcattttgttgttcagagattgttgtgtgcatatctgttagatataattgatttattgtgatattacacacttctattttctctttttttgtggggtgaggggtgagacagagtctggctctatcccccaggctggagtgcagtggtgtgatctcggctcactgcaacctctgcctcccagattcaggcgagtctcctgcctcagcctcccaagtggctgggattacaggtgcctgccaccacacctggttaatttttgtatttttggtagagacagggttttgccatgttggccagggtggtctcaaactcctgaccttgtgatccacctgcctcggcctcccaaagtgctgggattacaggcgtgagccaccacacctggcccacacctctattttcttgttttctggttattctacccatcattgagagtaggttcttgaagtctatatttcttagtgaggaaatgtctatttctcccttcttttatgtcaatttttgtttcatatattttgatggtttactaggatcataaatgttggtcatctttatcttgtaatttttattaatgtataatgtacatttttgtttgttgtaacattttggattaaaagtctgttttgtctgacttaagcagtctacaaaataactgcttctgtaacaccttctctcctacccctttcagttgatgctacaaaattatatgtttaacattgtgtatcaaaatatatatatatatttgagatggagtcttgctctgtcacccaggctggagtgcagtggcgtgatctgggctcactgcaagatccgcctccagggttcatgccattctccttccttagcctcccgagtagctgggactacaggtgctcgccaccacgcctggctaatttttttgtatttttagtagagacggggtttcaccatgttagccaggatgatcttgatctcctgaccttgtgatccgcccgcctcggcctcccaaagtgctgggattacaggcttgagccaccacacccggcccaaaatatattttgtaaaatttattttttgttaaattttttagaagataacttgtagagttataatcaaagttacaataatatttactggttttttgcctaatgtgtggttttataattgatcaattcaagtcatgtagaatctaaaaaaggcaacaggctgggcatagtagctcatgcctgtaatacccagcactttgggaggctaaggaaggaggattgcttgagaccaggagtttgagaccagcctgtgcaacatagcaagaggctgtctctacaaaacaaattttaacaacaaaaaatagctgggtatggtggcatattcctgtagtcccagatactcaggaagctgagatgcaagggtctcttgatccctgaaggttgaggctacggtgagccatgatgatgccactgcattttagcctgtgcaacagaatcagagcctgtttcataatgaaaaacaagtggagggacagtacaccattattaacctctcataattgctcaattatttacctttaaccacatctttatttctttatagggcttccatttactatttatttcaaccttcaggagtcttttcagtgtttctgtttggtgggggagcagatctaatgtaaacaaactcctgttgtttgtacatctgggaacgtatcaatttctcccttactttttaattaacagttttgttggatattagattcttagttgagtatttttttttttttagcacattgaatgtgtcagtccactaccttctggccttatgagaaattgactgataatccctgttacatgatatcgtttttctattgttgctttcagaattctttctcttttgctcttcatagttgaaagatattgtgtctcattgtgggtctttgagttcatcttgcttggagtttgttgaggttcttagatgttagaattcatgtctttcatcaaatttgagaagtttccatctagaatttcttcagatattctttctattgcatgctttctcttttctgggaatcctgcatcgtttgtattggttagcttgggtggtggaccagaagctgtttagactcttacctttcttcaatattttttctttttgttcctcagaattgataaaattctgaagtttgctgatcttttttgttgcctgctgagataatgcatttgaatccctgtagaaaatttttcatttcagttaattgaatgtttcatgttccagaatttcatttggggttcctttttgaaagtttttttatttttgattattgatccttccattttgctcatgcatcattttcttaaccttctctatcacttcctttagttctttgagcaactttaagacagttgttttaaaagctgcttacctgtcttaccatctttgagatcagaagtggtaaactgatgagagcacagcctctcaatgtttgtataacagagtggtgtgttttgttttttgtttatgcctaccatcactccttctgcaagctgtatgtaagttgtccaagaaatgtgtacagctaccttgcgtgagggtgtaggagttagggataggtaatttgtactttgctaagagttgatgttgagtgaaattaacctcaataaatctgaatttagggttaatacaatcctccagagttccaaaccagttatatcataccgattattctggtgtatttatcatctcagggggagaaagagttctgttgcgtcctgctctgccatactcccagaatcctcagctcaccagttttttagtttgtttgttttgtttttgtatggatacagtttctcattctgtctcccaggctgtagtgcagtggcactatcatagctcactgcagcctcgacttgttgggcccaagggaccctcttgcctcagccttctgagtagctgggactatggacatgcccgaataatgtttcttttttaaagagatggggtcttactacattgcatagcctcatctcggagttctgcactcaagcattcccccagtctcagcctcacaacgtcctgggattctaggcgtgagtcactgtgcccagcttgttttacagtagtgaaatgaatctgcccatttatactttctgattatcaatgaaagttgtgttctataattttgttgcttttcagttgtgatagtttatgcatcacataaaatttgccatattaaccagatttaattgtactactcattagcattaaatgcactcacagtgttgtgtaactaacaccatattcaaaacttttgtcatcttaattggaaactctatacctgttactctaatccctagtcccttgtctccccaatcatgttttctgcatttgattttgcctattgtaggtatttcttacaagttgaatcacatagcatgtgttttttggttcctggcctattttacctaatgctttcaagtttcatgtaatacatgagaacttcatttcttattatgaccgagtaaatccattttgtgtatgtatacatgtgtgtatacatgagtgtgtgtgtatacacatataacacaatttttatccatctgctaatggatagaattttaaatctattcctctgctaatggacattttatatgccagtgctcaccaaaacattcacagtgtccattaagagatgaatacatttaaaaatatgtccattaatatttgagtgagcattggcatacaaatatctgagttcatgtcttcgtatctgattatgtatataggggaatgaaattgctgagttatgtggtaatttaatgaactcactttttgaggaaatatttgttatttattatgagaaattgaagtcaccaaaaatgagaactgaataatgaaccttctcatatctagcaactagagttaataactatgaacattttgccatattttgaaaattacagttaccatggtgatttaatcctgaataggtttatatttttatgtatcaatttttaaaataatcacaatatcctatctctacctagtaaaatttactaaaatcccttatgtgtcttctaaacacacaaagaaaaaacaattctcatttaaatttctcaaggttgtgcatggtgtctcaagcctgcaatcatagcatttttggaggccaaggcattttgcttgagcccaggagttccagatgagcgtaggcaaatagtgaaacctgttttcacaggaaaaaaaaaaaatgaggtatggtggcatgcacttgtgaacccaattatttcagaagctgaagcaggaggatcacttaagcagtaggctacaatcacaacactgaactccaggctgggtaacagagtgaaacattggctcaaaaatataaaaaattctcagttgtgcgaatgatacaacagttttttgagcaaatctggatccaagtgagtaattcacttttatctaggctatttttatgttagtcttgactgtattaatttatattcaatcttaaatctctcttaattaaggtatgaaagtcaacccttttttggttctatatttaagtaatttttaaaaaaatcttgaattaaaaacattatttagaagtaactttcatattctactggatttcttatttgctggtttttttggggggattgattctaccctttatttttagtattctgaatgagttttggtgagctactgtggtccaaaatatatattgtgtatacacaatacatagtctgaattcttgtataacaaaagtacagtccatatttgtaaggggtgcttggaaaggtatattaggtatattaccttacatgtgtagatcttcataagtaatagttggcaaggtctgctataaacttgttacatatttctatatttgtcattatattagagacatttttagtctttgatgttatttttcccattaatatggtgtcctgacctggtcatgctttcagtttttcatgagatcatgctaatgaaatttcttaaaagttttgcaaatataatctgataacgtactttgattttttgaaaaaaagtcatctcttacccagtaaatatcaactaattgctggttttcttttgtgatttcttctcaatgtattttatattaaggtttggagataccagtccttttaagcctaatcctcatgctatctggtaaaaattattaacaactaaaaattacttaatgtatattacaaaggaggtagtaccatctatgaaatctttttgataaatcttactccactctgtcttatgtatgtttaaatgagcaccagaagaattatgcattacatttcatttgattggttaatctttgagctcttggtttttaatatttgtttcttgctgttttctctttgaggaaatgagttatttgcgatataaaactttcacatttctacattgtgcccatagtaggatgccacccctgtggtcatgtttaatagttttttctcagtgtttcggtgtttaatattttctatcatttttttaaaaaaatattcaacattgagacatttttctcaatgtattatattctcaagatctgattttttgtctgactagttttatcaaatcattaattcagccatttattatatgaacaccttttgtaaaacagaagaacactaatttatcatgatattttcatatatattttgtgatattgagaatcattaagtattttatcacctgctttttacaaaaacacaatagtctctcatttcactaatagttatacatttgctctaagtatcagtaaatttactctgaatgataagttcttcatttaaataggaacttaatcaacttttttgggatttcagttcaaaaggaaaggtaaataaatgttttttcccttatcttaccatttatataataatgaattgatgtgcaagtaatcttcaaaggtgactagtttttaaattcatgttctttattcagaagacagaaagcattttcaggagatttgaatatttgaagttatattttaaaggtgataatgctaatagcataattaaaaaacagtttctgcatgtaaacacatggtagaatataacaggtaatatatatttgtaattatttttctatttcatgtttattcaaatgtatgtacaatctctgtagcttgtagtttggctgtgttatgctttataaaatttatttatctgagacagggtctcactctgtcgcccaggctggagtgcagaggcatgatgtcagctcacagcctccacctcccaggttcaagtgattctcctgcctcagcctcccaagtagctgggactacaggcgtgcaccaccacatctgactaatgtctatgtatatattttttagtagggtcaggttttcaccatgttggccaggctggtcttgaactactgagctcaagtgattaacctgccttggcctctcatactactggaattataggcatgagcctccacacccggacataacatttattttttattttatattttatattttatattttattttatttttgagatggagttttgctcttgttgcacaggctggagtgcaatggcacgatctcgcatcaccacaacctccagctcccggttgcaagcgattctcctgcccagcctcccaagcagctgggattacagataagtgccaccacgcccggctaatttttttatttttagtagagtcagagtttcgtatgttggtcaggctagtctcaaactcctgacctcaggtgatttgcccgcctcagcctcccaaagtgttaggattacaggcatgagctaccacgcccggcccataaaatttatttttatcccagttgtgtgtacttatttacttatgtatttatttatatttatttatttgagatggagtctgactctcttccccagactggaatgcagtggcacaatcttggctcactgtagcctctgacaccagggttcaagccatcatcccacctcagcctcccaagtagctgggattttaagcatgtaccaccatgcccagctaatttttatattcttagtagagacagggtttcaccatgttggccaggctggtcttgaactcctgacctcaggtgatccacctgcctcggcttcccaaagtgctagaattagagaggtgtgagcctccataaggaatatgatttgaagggaagaggggatatgagtgtgaggtaaatgttttcctatttaaatattgaaatataaaaggctattcagtttccattcaagtaacatttggaagctttttatttcataatactattttgtgtagaaaccattactgtttgttttgtatttgtgtaggtaaaaagtattatgaaattatgtaattacagtattcactctgccaaaaaaaacaaaaataattataactcgggtatctaatgattgaacatttagtaattcttccctgacaaaaagagaaaaatattataactcaggtatctaatgattgaacatttagtaattcttccctgattataaaagtagcacatttatactttggaaaataaaacagcatgtatgggaaaaagtaataaacatagagaaattccatcacctcccttcccctctcctccaagaaaaagtggcttacgcctgtaatccaagttcttagggagccagaggcaggaggatagcttgagcccaggagtttgggacttgcctgggcaatatagcgagaccctgtttccccaccccacccccccaaaaaaagaaaaacgtaattccatattttacaggtttagtgttgacttcataaaagatggaagggaaggttatcagagtatcccattgtagtgattatagtgctcagattctagctccatacctgttagaacacattcgcaattgtcagcttaaactatatttgtatgtattgtttgtctgttttgtattaaaggcaaaagctcattatcaattagttgtatgttttaaagagttggccacaacatccatcataagacctatctaaagaggaatacatgatgtcttagtacaaaggagtagagatacaatgaatgtatttattttcatgtttcttaagagggaatgcactagcaattgacggtaaaatagatacaaatcaagtaaagaaaccagtatatttttagtcattatgtcgctttgaacaacaatttgtttaatcattttgcggtaactggttgcttggaactgccttattttttgtattcaatatatttatttatgggagtgtatacatattccagggtgttctagttcctcagggaaaatctggatgacatagaagaattttgttctttattatgagtcaatttataatttcatctttttttaaaaggcatttttcctacagctagacgttttgattgtcacttttgttgtgagaaaaaaattacaaagacgttgtaaagattgggaatgaggaaggtgacttgatcgggtatcacagacttacaaaatcttgtatgtaattagagttatgttaatggcacatttataagcaaagtaatgtcatggaatggaagacccataagttgacatgagaaacagaaagtgtattaaagttaatctgcattcatgggggcagattgttagccaaatgaataaagaattagattcatcttcatggtatgtagcatgaagaatttaaaatgaatcagaggtttaaattaactgcagaaattatagagtttcagaaaacgaatttctctccaattttgaggaaattactgatgatacacattgtagaagcaacaagaaacacaaagattgatagtaaaaatgaaattacagagttgaaaaagttgtgacatcacataagaagagtgaaacccttggtgtgtaagatataatcggggaaaaataccagttcaaaggaaaagtgacttgagcacatagttcactgaaaaaaatacacaaagtgctgttaatcatataaaaggattcttgggtttgctcataataaggataatgacaattgaaaatacaactaagatataattagtttctctactattagactagcaaaagtccagaagtttgacaacatttttttttttttggcaacatgttcggaattatggaaaatcatacgttgcttctgggcatgtaaaatgtaaaccatatgggtaggaatttaatattttgtaaatttatatctgtggcaaatacatagttcatctcctagtaatatgtagcagtaagaaggattgatggatgtttgtataccactatgtgataatgtcttggatataatgtagaaataggggagaagtcggctacaggaagtaaaaatggcaatatggtgctcagggtgcattcatcactataacagataaccattttgttaatggtgccctgcgcggtaactgaaattgtactgggctttcaacagaattttgtcaaaatgggacgctgcatgagctaataagttgtgaaataaatagggttttattgtggagtaataagtaacacaaagaagggggtttgcagtatcttaggaagaagaacagacgttcttggtaaagttcctttaatatgaaaatagcatttttaaatacttggagtagtgagtgaagaagctttctctatgagagcacggttagttcccaaataaatcccagcctcctctcttctgttaatttcttcggaaggatttgaggtagcttttgaagtatttggtcaaagttgcaaactcctcgggaggaggccaggcatggtacctcacgcctgtaatcccagcattttgggaggctgaggcgggaggatcacctgaggtcaggaggtcaagaccagcctggtcaacatggcgaaaccctgtctctattaaaaatataaaaatgagctgagtatggtgatgcacgcctgtaatcctagctacttgggaggcttgaggcaggagaatcacttgaacccagaaggcagaggttgccgtgagatgagattgtgccactgcactccagcctgtgtgacaaaacaagactcctcctggaaaaaaaaaaaaaaaaaaaaggaaacctgagattctgcttaacaattgtaaagtcagaaggtatgaagagtatttgaagttagacctgtggacaggctgattggatcttcagcagtatgagaaagtttagttaagccaaggtactatgtaaaactccaagctgtacagagctctgcctggccagctggtcagcacttgggtaatgaggaattgataaatggcaaattgcttcattgaatgattggattaatagtagcatgaatggataaattaacgggaatgggtatataaatgggtatgagatcaggaatattaatggagtcacaagtagatgatgcgtaaatgggactatatgtgtggattgatggatggatggaccctgaaatgcatttttgatggaattagggaacaagaataaatataataggaagtgtggtatgcatgtaagcatgtttgtgtgtgtatgtgtatataggttgatgcaagagtggaagggtagtaaggacaaaaactttggacagctatattgacaatgcaaaataaaaacatgaatgtatgaatgtatgaatttgacggatatgtgcttgaaagaatgaagtcagtttaggaaaggataattaacaaatctcagtaatgattgtaatcatgtgattctcacagtaactgttcaacagtgactgttaaggatgctgcgtgctcatggcagtaactcatgggcagatgtcacaaagacagtaatacctcttattgcttttatgacagcataaggttttatttttcactgtggctttgttagagttatggaaagtcatccattgcctcttaaatacgtaatggtaaattgggtaaaggaattgggtaaatcacatggttttccaaaacttcaggagatttagaagctgtattttatgttttctcaaggaaaggatgaaaaggacacgttaaacactgatagtgtctactgtaggatacctttctggtctcacaaactaggtatactttctacttaaatggaaactatccccttcacagtgggaaccaataaaaacctcacccaggtaaaaatccagcgtctcagtgatgctatctccctatcatgaggtaattcacagtaatctgtaccttaagtctcagtgtacctactgttggcccagagataggtgaaacttaaagataattgtaccttggctgcatgtagtggctcatgcctataatcccagcactttgggaagctgaggcgggcagatcacaccgtcaggagttaaagaccagcctggctaacatggtgaaaccctgtctctactaaaaatacaccacaccctggtgtggtggtgtgtgcctgtaataccagctactcagaacgctgaggcaggagaatcgcttgaacccgggaggcagaggttgcagtgagctgagatcgtgccattgcactccagtctgggcaatagggtgagactccatctcaaaaaaataataattgaaccttatttccttttgtacaatgtacaatgagcagagtcagggcaactataatacaactccaaactctaaggtgtcaaatgtgatagaaatcacttttccattgaaattttgaaatccctctggaaatacactgtgaaggctccctatactgtgctagagagtgttttactagggcctggaagatgctcactttttccttgttttccttggctgtagcttttacctctggcacactttcccaatccccttatcctacttaattatttttaaaataggcattgtggaggatgtttgttcatattttaagtcttaatcatgggcttctagtttctttggaagtaaaagtgacccattaaaaatgtaaaatgtgttatgtgcatcatgggcacaggagtttcgtggcctatatgtgattctaacttatatcttaccatggtgatcgtagaaccatgtgttgatatgtaattttcaaaagaggtgaatgcccttggcacagtaatctgtcatatttagcaaagcttccctgagagccatcataacagacccacaggaatattttcattagtaagaagtagatgtgttcagccagtaaaattttgaagtggccatgacttcaatctgagtacagagggaaagttacacacaataattcagtgattggtggataggtgcgttcaaggaggcagggttggattggtgttttcaagcttggtagtagtagtagacaggcagacatgtgagttgatggaaggatgcaagaatggttactgaaattttctttgtattatatggttaatgtggatttaataactagtcattgaaattatgtgggattggatatttaaagcccagaaagatgaatataataatcgtctaatataatttgaaatataataacggatgcatgcaaaattgggtgtattgaataatgtaagaaatagatggaaagtagaatatgagcaaatggctggatgcaagaatggagaatgcaggttttaaaaacctgttgggtgtatgtatggttatatgcacagtggaatcatttagtgaaggtgcagatggttatatgcctaggtgttatcattggatggatcaaaaatggaatgctgtatggatagatctttagattgatgagtacaaatatggctatctaaaaccttggataaatgtagggatcagggttcaggtacattggttgcataagtgatagctgcctgtttggtggctttagagtggcttaatagactgatagatgggttgattcacaaggtgatggtacaggaatttgatgactatgagaatgggctgatgcaataataaagtcatatatgtaaagttgactggaaagatggacatttgaaagccaatggtatattttcacgggcagattcattatgaaattataaaagttttgtttttgcattctcaacatgatgtgttagcaaataagcaaaaactaactgcagtgggttcacaagttagtttaattaaaatgatctttcaatattttaataatttggggactttaggaggttgaggaatgagagaacttcaccttctgtatattaactggtcgtatgtcacaattttcccatatttttcacagttatagctgaggtggtaccagtttaagaagtgagaacttcttcactgactgaaatttgcatatcaatccaaatcattgtgcttatttactatttttgtagacgtcattcttcaaaagtgctggtaagaatcagtaaccctggtgtactgtttatttttgaccagtttgatattgaatctaatttgtaatattttaaaatccaaaactatacatgaattctataaaacacaaagttgtgaatttgtggagtgattatcagttaggtgaaataaaagagataaaagggctccctaaattttgacacagttttgatatgtagtttatgcaggttttgatttaccagtcttatctactctcaccgtagtatgtaatgtcatctggactgagactataactttttatctgtatactcagtaaattttatattatttcagtaaattttattgaataaatgctctggaataaattcatcagctagagggagataagaaggaagtctggcagcctgtggaaaataaagaaaatggataggctattaaaagatgtcagagaccaaagtcattaggaattagaatttactataaatagtatgggttataatgagagtagcaggtttaattttagttccaagtgcatgatttaggatatcatcagtaagtaggtaaggtcagcagataggagttgaggaatatttcaacattgaagtggtaaaagtagggtcttaacaccctttctttcgatgagtgaatgaaaaatcttcaactattttccaacattcctgtttttcttttttttcacaagcatcttcaatagtcaaggaggacaaagacatctttcctgcaggtaaaatcattaaagactatattgtgattttgaagctgttctatttgctacgttgaggatatattagattcttatttgagttctttgaaattaaatttcttttctcatacatcctactttgtggttatgtgattattttgagtcgatattttaatcaaggactttatagttaactcttgttaataaccaacatttaatgaaatcaggcattttcttgactttagtaccacgagaagttgcacaagaagcatacagggtagcaaggagaattgatgggtggatactgggttttagtttgtggaaagatcttaatggaatacacagagtatcttattagtatttccttatattgtgtcttttaaaaaaattcttaacccctgaattggtgtataaattagaatgaagaaactacacaggaaatgctggttcaaagaataaataggtggttggttggcgtgaaaataatttggaataggagataggtattcaaatcacaaaaaaatgtgtagagaaacgaaggaaaatggcagctttatcatttgcatacagtacgtatacctggtttttgtaggttttgggttattccacatcagattgtaggagttcggttttatggagtattacttgacttgaagatgatatatttctgtcaccaggcatggctgtgtcataacctgttgtttatttccatttgcaatctcttcttctgtactctctcaggtggtgaccatgtggataataggatcatagacaaatggtggttccatctacagcatcaccgaaatgctgttgttactgcttctttctgggatcttcttgcatctttgcttctaaaggggcacaccttttatagaagtacgtccaggaatagaagtgacctgctttttcgcaagtaattgcctggaatgtttttatgtacttctctgcactctcaatacatttcatgcttccctctatttttgtatattaactcattgtatttcttaaatttatattttactttatgaatggaagtgagatttgtgtatggtaaatataattaattcaaccccatggatacgttagtcactgtccagatgatggcaagtctttctcagaagcagagggccttggtgtgccagtgattttttttccccatgtgtaagatactttttttcctcatttgaatcaggagcccacagtttttagacaagtcccaaatgaaatcttaagcatttgtgttatctggactagaccttctgtagtatcctttttgttagacctagtatatctcattgcagatcaggatctgagattgactatagttcacctctttccaagtacacaaacttggatgacatgacaactgagtgtgtaagggagagcgagacccttgcactgccatttgagcccttgtgatctcatcttgtagaacatgttgtacaatcattttattggtatcattagtgttatttggggctggaataaaaatctcagtgcaccaaagagatttcccctttatccacgttaccctggttttcctttgttttctgtttaacctaaacgggcttaatataaaatagtgcttatttggtgttttaattgtctgcttctataacataagctgcactgtccattggggaactgctcaccatattgcccaacctgtcttgataggtttatacatgggaggcattcagtaatattaattacctctctagaccagtgttagcaataacaaacacttgctagaattttaagactatataatcaatcactttgatgtcagttaatcctaccaacacaagattaaaggtttaaaaatctcatacgtgtacagccattagtgtctcctttcatactatattattttgttcattggcagctagatttttaggtagaacttgtgttcctttttgcaatgctcatttattttacctggacagaaggtgctcttctgtctcttctccaaagttaatttatctcatactatttcttgtgttaatattttccaagttcagtatgctgttctggttataagaagatcagtgtcctaatcacacacttttacattatatgaaacatcatacagagttttgtagtctgtataacaatacacagaggtagcaaaatttgtaaaagagcagactatatagtccatactgtagtaactactcaacattgccattatacgtgaaatcggctataaccaattcataaacaaatgaatttggccgtgttctagtaaaacttatttacaaaaacatgtgttaggccagatttggaccacaggctgtagatttctgacctctggcttacagcagaagtttattatgatcctggggaaggtggatatacatggaaggcagaagcgagaagatgtattccatcccatgtcatttttctgaaccctcaacgtaggaagttaaactaaaacatggggcagaatctgctttaagcctttgaattcttggctcttaaagccaggttgagggttatgtgtttttattcttttatatctccttttcacttaggcttggcaactagttcattgaaacagagccaacaagaatgagtgagtcactcagtgatatgaagcaagctgtggtcatttatctactaccttccatacctacttcctaggtttgataagtagtgtttgtagtgtagttgtcagtaacttttctcagcttacataagtttatgtggaattcatttacaaatgtgtgattattacgatagatgttattttataaatttcaaggttctttaatacagcatggacatgtttctaaatcaataaatatagcttacccacagactttttatgggatgtaaagtatgtattacaacaggtaaatccatttctctgttttgggaaagcaggttaatgttttgtttgttttgttgctgcatataatgttgcactatatatatattctaatgcagttggtctcctaattctacaggataaatgtctagctgtggcattgttggatcatcagtttcgtttcagttagatgctgtgaaattgctcttgaaaatggtgtcctctgccaccacagaacggtgttgtaatggaagtgccaattttcataaaaacttgtgtgcaacaggtattaagaatttttgaggtcgggcgcagtagctcacgcctgtaatcccagcactttgggaggcctaggcaggtggatcacctgaggtcaggagttccagaccagcctgaccaacatggtgaaatcccatctccactaaatacaaaaaattagctgggcgtggtggcatatacctgtaatcccagctacttgggaggctaagacaggagaattgcttgaacccaggaggcggaggttgcagtgagccgagattgcaccactacactccagcctgggtgatgagcgaaactccatctcaaaaaaaaaaaaaagctttaaatttttagccaatctaataggtgaaaatggcatttttaacataagtctgacttaaacaattaatggccgtggctaaaagaagaatcaaataatgatgtgtgatttataagataaggaggcagtaccccatttttcctcactctacccaaaaatcctgtttatctgagcaagaaatcattaatattttctaaatccgcttggaagttcataaacgccctaagtataccttataccagcgtttttatgactttgtatttttgaaataattttagattcagaatcgcaagaatcatgcagagcgacctgatttacgcttcacctagattgactttttattctgcatcgttgtgttcttcccccacttcctcttcttgctctcgcctccctttatatgtttatacatagcattatcattttatgtactatttgaatgatttgccgacattatcttcctgtaacccaaaacacttcaacatctactttctaagagcctgagcatcttatattgacttcggtaaaaatttcaaaataatgaaatgtgtcaatagtataaaagtataacagtatgcagtccatattcacattttacccatttttccagaggtgttctttatagcagtttcttcccttctacaacatccagaaaaggatcttctattgcattcaattatcatgtctctttagttttgtttaatctgaaacagtttcctggactttgatcacatcagtgttcttaaaaagtaatagctaacagatttaaggagatacctcagattttgaattttgtgtttcctcatgaaaaggtttaagatactcattttgagcagaaataattcagtattctcagtcttccttagtgaatcatctcaggtgacaaataatgtcactttgtctcactttgaattactttgatctcttggttcgattggtgtccactggacttttccactatagttaacattccttcataattaatttggaactatacaggtattctatttttcatcaaacttccacatagtaggtttaatatgcacaggtgacttttacctgaatcagtgttgattagaaaaaaatctgttattgcttagatgcattatttagtatcttgtactgtaaggaagagtttgtatatcatggcctgtcagaacagtcccgcaatgtgttttatgaactgaaaattctgaaagaataaggtagtgatttatatgagaatacagggaaagggttacccaaagagtctaatgaatttatgtctaaaccatagagtggaatgtgagagacacacagaactccagagttgtgatgcaaatacactgcacagtggaaggagaagaggaagtttttggtaatagtgtttcatctaatgtagctctgtaatgtatgtgtgccttcattattggaagagtgttcaacagttcacagttgaatagactgaagcatgatgctggaatctgggttcagattctagatccgtatcctacatatcaccaatgcttgtttctcaatttttgtttgtcattactttaagtctctttaatgcattagagtatccaaggttgacagtgaagggactgcatttgggagctatctgaagacaaaaacagctttttgaagtttctttcatacgtcaccttacatggcctctcgcattctctgtggagaagtttgtgtagattattcagactaccgtgcagtgactgtgttgtttaaaacctatacatatccaaactctgttttgtgttctctataactagggcattagtctcccaatagtaatcctgcatcttatgctatttaaagaaggttcccagaatacagacattcttacttttgaacaatgacttgggtagattgaggaagtggttttaataatcactttgatatatttcaaaatctggttcattattggtgaggtgcaggccacctggtattaatgaaaatgtgtaattaggaaccagtgcagtggaatcagaggcttgaacatgacctaaggcttggtcaaaagtggtgatctgaatgttccctgctctctgtatgtaactttgtacttagtcttcagtggcagggttgcagcagaggcccagtaaatattgttcattcaacgtatgaaggagaaaatggaagtaaggccaaaaattactgattgtaaacaaatgaagcaccaagtgaataaatgtacaaatagacaagtagccagtaggaaaaaaaacaataattgttacctaaagaatgaaaaccaagtggaaaaggccgccagggacattttaatatgcatattgttgctttcacatataatacagtaagggagtatcagaaaacctgaatctgcctgactaaaacataccctgttccacaaagctatatatatgagagtattgaaggtggtttaataccaaattcaaaaattcagcctcagtgtagcaaacttttaaattttccatgatataaagtaagttttaaccaacaatggaagtcacagcactaaagtacattactattatatgattctctgatggtaatagaaactgtgctgcaggacacgttttgattcaggaagaaatgtggagtaactccacagaggaattcatcctttctaagtttaaatctgaacggaacccatatgcccataccctgaagatgcatgtaagggaacaacatggcttggtctgttgaaaaaagaaaagaaccttcaattaagcattctgtgaacttgataagaggatgcagaggaacgtaaatgcactctgcatatctgtgattgaccttggaacacagtgattgccctctaaagaatagccgagtaagtactgttatcattccaccgatcaaattagagcctcttccttccagtgggagcagagtgacatagaccaaggaaagccgaggagaagattgtagccttttatttctccttatatttgttgaggttcactgctgactgataaacgatttgcacaaaaaaattcaggcctctgactcttctggtatttgatttatctagtaaagttaattccaagacaaaagtacagttggttaaaaataccagtctcatgtttatttgatggtttgaaatattctgttacattgttgtatctcgtttgtcaccttggaatatatgacaatcatgttatcttgattttttccacaagataatttgattctaaaatcgattcattgtttatcttcaggaattagagattttaaaaatgtcatctcatgtctcattcagtcatttccaagatttagcgagtgttctccctaatgccttggataagaatgccttgttcaatggctgtattttactcataattagcattccaactgctttgggtttttttagatttacaatttttatttctgcagtacttaactttctatattttatgtatattaaaacaagttaggtaggatgaagatcactggatgatataaatactaatagcaaaagtagaaataagttgtattatataagttgtacataggtgttacattaggttgtcttacatgaaagtattacaaagtatgggatttggggtgtattttgaaatccttgccagttctacttgataaagtattgaatggtatcatgtgagaggagaagaggacggaaacaggacttatgatttagacctcaacaactgctagggagggttggttttctctgagtgcatgattttttataaaaatgctattttgccagttttagatccatattaaacccacagattaaggttttggtttttaaagtgtaaataggaagcttgagctgggggggaatttggaggtagagataatacttaatcgctgtgggaaaggatgagatctagagatagagtgtatgtgggagtaggaacatatgtgtctgagaccatgctttggatgctctagcatttagatattgagaaaatgaggaagacccattaaaggagattgtggctagagttactggtgaaaaccaaagggttgtagtgttcctgaagatacatgaagagtgagattaaaaattaatggggcagcagtggcttttgcatggcattgaaaagacacagttcaatttgaaaattgagtatcattaatcgtagtgctcttattattgaaaaggccaaatcaaacaatacctttgagttgatggtctgtactataattaggttaccattgttagcccagcatagacacatgctgatacctgtgagttgctttcatcaattagtatgtgaagatgcatcccagttgtacaattttagatcctcttcatcattccacattatatgtatacaagataaaacttgatgttttcattacatcctttcaatcttctaacagcagtccttacgtagctttatcattggagtttccacttgcagtgtctctatctgtacctgcattcattggccacggtagagttttcattacggcaggattgcatttcattgttttggcttgtgtcagacatttagcaaagattgttgaggaaaggaatggatggaaggggccagctgaaagaaaaagtaacaacctaatgatggataagtgaaaaaggaatgaagaaaggatggtgctaggaatcgagggagtaaagcaagatagaatgtacaaaaggtcgaatttttaaagaaagttgtagggcaagggcaaggtgtgttgaacctacatttaaaatacaataacatcactaaagtcgaggccgggtgtggtggctcacccctgtaatcccagcactttgggaggccaaggcaggcagattacctgaggtcagaagtttgagaccatcctggccaacatggtaaaaccccatctctactaaaaatacaaaaattagctgggcgtggtggcgggcgcctgtaatcccagttacttgggaggctgaggcaggagaatcacttgaacctgggaggcggaggctgcagtgagccaagatcatgtcactgtactccagcctgggcgacaagaatgaaactctgtctcaaaaaaaaaaaaaacccatcactaaaatcagggagaaaaaaaccatcactaaagtcagggataaagtaccattgtggaaggtgttcttttccagcttaacctgaagaattgtacagtcattgtacattgtcattccctaactaatgggttagatatgagtctgtagaaaattgtttgtccaacatactttatgcctcttaacatttcacttaccaaatttcatttcattccttcattttgtgtctaacagactagaaataatgagctcctattgacagggatattttcctcttcatactttcctttaccttacagagccttttatgtagcagatatttaatttcataatgggtctaaactacttgtttagaccatggatgagtgaaattttgatgaatgagccccaatcacctgaagggtgagtaaaagaagaatttctagagacccaatatgaagtagctgcttcacacttttttgagaatgttatggcatgactgaggaaatcatagatgctgtagaccatgttgagttggattgtgtaaatatagattctggtattagggaactcagcatctgctggattagacttcttatggtgaaagtctttttttagggattaggcataaatccccactgatatttgtgcagtaatagagtatagctcctgttttctttcctgcttgtatagcctgtgccattagtgtcctctttctcactgttttctcaaaggaaaacagtcaaagaggaagccatatgcatggtagactttgtaatccgggaaaagtcaacatatttcatagtagtgcactttttatgtgttgtcagtccttagaaaggattcattttctccatattatatactactctattttaaaaatttcttgggggagaatggctgtagacaggccaatgatagaatcatagaatatagtcactgtctaattactttcaatcaagagagggaacaataaagtacaatgtatgtcgctgacttcagtgtgaccactcagtatttctgtaacacagtatttatattgctgtacggtagagttatacttatttctgtgatccagttcatttgtttaatattgggattcaaggagtgttgaagaaatgtctactgattaataacagatgggaagagtgtatgtgttttaaataagagaccaagagagacaataaggaaaataagaaggaagtgtttgtgaacctttcacattactcttacattcgggaagtccacaagacaccgtagtggagattctgaggaggtgaaaacctgtagaaaaatgctttattagtaaggagctgactaagttgtcagaaagtgttgatttttagaaggatattgagacattgggtatatagggtatatgactccttgtcttcctttcattctggcttcttaccagctgttgtgaataagtttaagatttcttctgacgttataaacttcagaaaaggtatggctgtttgttcagtttgaagtagtatcatatccgccaaagccttgttcaattgtcttgttgattcatggttctcttcagtgataatattatatgggattcctacccacagccacccaatatctcagtggagaaatgcaggtttggagagaacatctgaatagaatcacgctaagatggtacatttgcactgagaccattgttatgtggcaggcagacatgaagtatcctaggattgatcagtatgccttaatgtaaatagctgcatatagacctgatttcttaggctccccacttcaagctcttgaatattgtgttgatatccttatcaatacactttgtcttgtgttctgtgttgtttttccaaaatataacgagctcctacttgacagggattttttctttctattgtcttacgataaaatgtcaagataaaaatgtatgagtttcattaaagtttattgaataaaatttgtgatggaatgagtgacagcgaggtcatgaatgagagagaatatggaaataatggagaatgtgatattctgatagtcatgcaatattctttttgatataatatgtaacatatattagtatgttatattctatgtattatttgtcatatattattactatatcctgttgctatatttggataatttgggaatctgccatgtttgatgatgttgaaaagagaacataaaatgtagtgatttcttaataaggtgtagaggtgtaggtattaactctttaagaatatagtgatttattttaaaataatgataggaaaggaccataaaaatgtctgaatttgggaaattagaaaatgttttctctctggggctttcatatgtctgttctatgtgaatgtcgctttgccatggctccctctttgctaactcttcttaacccctgcagagaaggaagtgtagtgatggtattttgagtccatcttcaggtttattgggaatgcaagggaaatgagttgttaccaatgggagtaaagggctagttgctatgccagtagctgctacttttgacactgcttgagcaatctgaatggctaggtttgaatctggcttctcagtcagaattttaccttcactctaatgctgctttttttcaaatcacctatatttacataaatatgaaccaacttcagtgatcttaattctttcccgaagatccaagtttctttccatctgcctgaagaactttctttagcacttctggtatagcagacctactgatgataatttttcttttagtatatggtgattagtttactttttattcaactgtgtctttttttgaagtcttcttcattgaaatatattgttactaaatatagaattaatggctttctttaagcacttcaaagataatccactgttttctggactccgttgatacttaagtctttatttttgtgtaattctttttctttaaatgtgccatttttcatttttctctgactcctacctactaagatatttttacctaagtattgagtcagttttggttatgatgtgactcagtgtgtttttatttatattgtttggttgtttgaacttcttgaatctgtaaatgttgtgctttatgttaaatttggggggatttcagccatttaaaatataacttttcagtctcttccccctgggactccaatttttacatatgtattagacctattaatatttttctatggatacctgacattctttttaaatcttatttttggtgtttttcactttgaacaacctaataatttgtttccatccatgttcactcactgtttattctattttttcccaatctgctcttaagcctatcctgtgaattttctttttaatttattttattttttagttccagatattttctgctttttgtttgtttttgagacagaatctttctctgtcacacagggtggagtgcagtgtcatggttcaccgcagccttgacctcctggtctcaagtgatcctctcaccttaacctacccactcctaagtagctagaactacaggtgcatgccaccacgctcagctaattttttatttttgtagagatggggtcgttgtgttgcccaagctggtcttgaactcccagactcaagcagtcttcctgcctcggcctcatgcccgcgccaaccagttctttatttttaatattatgttgtatttgatgtgctatcctattcatttagtataagcacatttttctttatgtcttcagcataattatatgctttttcagaattttaacatcaggactgcttccagggtagctttattgccctttgtcttaagtatggattatagttttcattctttgtatgtcaagtaattttggattgtaacttgaactttgaatatactgtagaaactctgaattctattttattcttctaaaacaatatttctcagcttcagcactactgacattttgaactgggtcattttgtttgtgttgttgtgtgtattttgggagggtactgttctatatgcattgtggggtactgagtattatcctttgtctccactcactacttaccagtagcataactctctctcctccccacatcccctgccaaaaaatgccttcagtcctttctaagcgctcttttttatggtgttggggccaaaatcatgcatctttactcactctttctcattgagagctatggctataaagggtagtgatacttttacttatttatttttaaggcaagcagttaacttagctggattcaaactccaggctgcctcgtgtgctgtgggaagcagcctacgctctattcagttcttttcttttcatattggttgggttactttgagtctggcctacatgatgggcagtttagaggtcaaccaaaggatttcagcagaacttatacacagaatttcattcaggcttcccgtgtctgattggctacagtgtgggaatttcctcccacttttcagccactactgaggatgcctttcggcaaaattccttgaaattggaaacttacagggaaattcctttcctccaagagtgcgctctcctccagtgttggcttgcttttggttgttctccgtggttttagatagctgtctttatattaattctggagtttacagttgatatctgttgggggcttagtttgataacatgtattcttctattactagtagccagacctgtatgtcttacttgacctgatggagaaaagtttcaacttatgagacaatactgtgctagctagttttactgatttgtactctaaagtacccaagcctaaaatagtagagctgtctatcccacatgaaacttctctgattttcactgttttttataaaaagtatacatgttcacatttctgtaggtttttttaagcatcacaatttttataaactttctatatttccaaggtctacctgctttgtattttgcctagtgagagttttgtattcatgtaggaataatctcttggtgtgagtatctattttccactcatccaaaacagatagagcattgatttcactaagcgttatgttctagtttgctttggtattattattagaaatacctggtgattaatttgagctaagtattcttctctaccctcattcccagcattatcacccgcttttaccacttccaaggggtggaagcattctccacaatgcattttttcatgccagagaaaaatctagaaaaaaatgaataaaacgaagaaattctttccccttggtatctgtagctaacttgcctaagtgttctttcccacagtttaagtcttcagtccatagttcataagcaaaggggtgtagcgagctctgatcttgccagaagagagaataagtgagctaccccacggtggacattctggccatctgaaatgagtcgatgcatgtggcttttgtctaaaggctacaaataaaatgtaaccactttcttctttgagtagttgatatagcaaatagttgaaacagaagttttgattggcaaatcaggatgtggtagatactttaacaaagagtagaactattaccagttttatgtgttgctgtttgtatctctttcacagttttgataatatcacatcctggaaagtgaaacagaaaattattattccattttaaatgactaaatttgctttcatggtatttacagtgaaagagtaaattagaaagtgaatggatgactgttcatgagaaaaagcagggtaaaaagattttatttaattaattgaaaatattagggtcaaaacataggcttatgttatgttttgtgaattgtgctgtgttgtagacatttgatgagtcctaacatagaattgatctagctcttgaaataccatttttgattgagtataaatgggatataggcaccttacaacttcagaattcgaggaagatgatgtgaatcttccaattttatctatttgattcaaatggtatgttttttcacatttctcataatttccacgtcaactcccatgatgatcatgcaggaaagcagcatgattgcacttcttgtagtgcataccatcactaaaacatagttactgtctttctgtggtcttaagaaaaattcagaaacagcataccaatgtacatataagataaataagcttatgtggtacagtaagtgttctgttctgagaaataccttgattcgtatcctaatgtctgatgttattggtagttctcaaacttccccaattctgctttcatctaaattcatcttatctatctattgttaaataatctatcagtccatttttatctatcatctatatatctgtctttatcaatcattcgtctgtaatctatctgtgccgtttggcataagagacagaagggcatagcagtggaaactcaaaggagttacctccatgtgaatggacagtggtgatggtgatctgtgaggtggtgatgtatagaaagaaaaactagaagagagcatgccctaactcagggaccttgtccagcaggcactctggccttgttatactgtgcttgaatatgaaaaaaaaaaaaatcaaaatagtgctgacattctttgtcttctgggtctgagaaaacttagagtagatatgatgactctgccatttcagtcttttgtatttccacatttagagctcagttttaattatgtagaattatttctccagcctgtgttaaactagaccatggattggcaaactttttttgtaaattgccaaatacacattttcagttctgaaagccttgtggtctttgttgcagctaatctactctgctgttgtgttatgaaagcagccataggtaatttataattgaatgagtgcgctgtgcctttcttccaataaaactttacaaaagcatcctgtgggctggagtttaccctttgggaaaccagagcattggctaaactggaacctgaaaaaataatcacatcaactcagccacatggtaataatatttagagtattatttcaacattttcattttcataaaaatttttttagctcttttgccaaattccatctgtgagtgatacaaatgactaccacgtgccattaacatcacctaaacagtgcaaaacaagcatagtagaagtaattggaatgatataaaccccttgctgtaatagttatagttgataaattatgtttcaaaattgaacctatttcttccaaatttcatctataaagttccaaggagttccaaaatcttgcctgccttcttttcccagttagcagtattgtctctgagcagccatggtggtatccatcctccttggacaatgaatttagcctattttgacttcatttgagcagttgtaattgtttcaccacatcagagtaagattactacatgccagagctattctttaactcagcttgtaaaaacatgatagcatcaacaatatacatagcaaatgaatgccatctttaatccaattaaatggtttttacaaatttgctcttgtttgttgatgctatctgcattgcagtaattaaaggtgaggtaaaaagaatgaataaactgccaagttaaaattaaatttgggcaatttctcttttgcagtaatgtatgtatatttactcaaaacatatgccaaatttagtgttgaaaggctcattcaaatcaattgggaaagcacgtaaatgaacaattcataaaagaaaagcattgcaaatggccaagagcatagaaaatgtgctcaatcttaccagtcattataaggaaataatgaaatttgtgtatatatgaaatacttaaaatatatataaaataaaacaattatttgccttttttcacctatcagattaacagattatatgtgttaacaaggtggggagaatttacaactcctgatatgttaaaatctttcaggaaggtagtagaaaatatatgtaagatggaaattagcacttttgaccaacaattttagttttagatatttacctataaggatataataggaggtgttcaaagatgcatgtaactcaatgtagtattaattataattgtaaaatagtaaataacatttttgtcaaatcataatgttaggaaaattagtgatggcacatttaaccaattgaattatattcagttctgaataccgtgatgcatgttcaaattaattgatacaaaaatccaacaactttagcagtttgtttaccagttattgagtaccaactgtgttcaacattgttatttcactcatatgaaatgataaatgtatgtgcgtgttatgatacggtcaataaaaccacttttataggaagaatactcacaaaatacagcgagttctggtcattattttattgttgcatttgtgtgtttgtgtgttttgaatacatacatgtatttcaattaactatagcatttattgaatttttatcacatgtaccagatggggagatcaacactttacatgaattataagttataatataataacttatataatgttattatataataacttattattataataacagatggaataacgaatttgtctttttaaaagataagtaaattgaggttgagtttgaattttgtaattcattctattatatagaagttaaataaacctatcctaggatgtcacaacctttggataataataattaaaaatacttatgatttattaaacccattgagcaaaatcatgttttgtgaaagaacccacatttcagaagtcatattcattcttcttttgtctttaaggccagagacatgataattattaagtgcagcttctcaggacagaaagtgtaagtgttggtatattgtaggaacaggagaaaaacatgaataggaacttgtcttttggaaattcttacagtataaacctttaaggagttacttctagaaatatggggtgcctttgctcaggatgtggaacaacatgttcccgggcagaaaccatattatacacaaagctctgagacatcatggaggcacagatgaaagtccaaagagaaatggccagtagaaagaggatcactaaatggaagaagctaactttggaatagagctggtgacaggtaatatgatgacttaaatgctgccaatagcagggaaaaggtccatggtaatatctgagtgaagaaacaattgccaactgatctagatttgaagggcataacctcttggaatatttttccagtgtaatttgtgatcatatggtctggattctacaaaatctcccccattctacaaaatctataatcagttctcttccattttcttcattcattctaacccttttctaaagacggcactttgtgtcttgtgaatgcaatcccttagcagttctcagctagtagctgaaactttggttaaaatggtaagcatgggggattgtgacataaattttgctttgctatggcagttattgaaatatttttataattttgactatttgtcatgtaaggaatgcacagtgccattctaactgtgtatattctggtatttggggggttggaaattgactatatgagattcttgcagctgggtctctgacatgttgagaatgctgaagaagaaaaagtacagaaggagaaagcagagatggggaaagctgcatccctcaaataggataccactggatactgagcagtgaacaacctctggttttgtcggacaccattttggaatatttggacacagtttccggaaggatgagagacctaatcaatggtagtaagatgtttaaaatattattaatacgaatgaatgcttaggcaaggttgacggtaaagctcttctgtacaataggtagcgttaataaagaaatgacaagatttggaaaatcagtatttggaaataatcataattgtttcagccaggaatcatcaaatgatgctaaaacttggagaaaattttaagagaaacaggacatttggtgtccttatcagttacaaagggaaagtagtagcttcctgatggagaacatggttgacagcacctgaattaaagaggtgaaagttaataccacagtagtgggaacatcaggcagcgctgataggatgcactgagaagaacacagtctcatttctgtagtattactgactaaactgcagaaacctgagtctacccatgaggaaacatcagtctcaaattgactgatattttgcttttagtattcaaacatactaatttcactgaggaaatggtccagattatttcagactatatagacatgagaatggaatatcacattggttcaggatgtctataaaaggataaggaaggttggcaaaatttgaagacagtccctcaagtagattatagtgttacgtgagtattaattgcctaagttatataattgcctgaggttatataacagaaaattcttgtttttaagaaattaaaacaatttaaaggataaagggataatgtcatagctgtaattttccaagcatttggataaaataatatacatgtttcaaaaaaaaaatgaaacagatgttgtaagatgttagcaaatagggaatccaggtggaaataatccaggaattatggatagtcttgtatctgttcagcaggtctgaaagtagttgatgaaaataatgcaaaagaacatgtcaaaaagaaatggtttgggcatatggcttcaagcatacataaatgctcaggaaacatgaaaatgtgaaataaatggatgagtactataataccagcaggccttgtagatacctgcatttgaagcatttatattagaaggaagcctttttacccagaatttttttcacttagcctaatgttttcaaggtttggccatgttgcagcatatatcagatctccattttttttgatggaggagtgatattctattgtataaatatatcacattttgctcatccactcactagtttttggctattatgactaatcccgccaggaatatttatgtggaggtttttgtgtgtttatgttttcaattctattatacatgagaatatagtaactgtgtttatttgacattttgaggacctgtctgtaagtgatgtttaagataatttttgttacatttgaaggcagataatagtctatgcaaaatgaatattctgttgaatattgatgtgaactattcttattgtaaaaaaaaagttacattgaaatagtaagtatagaagttatatcttggtggcggggcgtggtggctcatgcctgtaatcccagcactttgggaggccgaggcaggtggatcacagggtcaggagatcgagaccatcctggctaacatgatgaaaccccatctttactaaaaatacaaaaaattagctgtgcgtggtgatgagcgcctgtagtcccagctactcaggaggctgaggcaggagaatcacttgaacccaggaggcggagcttgcagtgagctgagattgtgccactgtactccagcctgggtgacagagcgagactctgtttcacccaaaaaaaaaaaaaaaaaaaaaaaaaagtattggtttttgtactcaacaagcagttttatgtttttatttttcaggaactctccaatactgaattcaggctgggatattagagaaaaggaaaatacatgaaactcagtggtgttttatggcactttgagttccccaattcaccttcaaacatttagccttccaagttctctgccaccgtatcagtgcatccctcctgagattcttaattctttgattgtgtaaagatggactatgcttactccatcttacttctcttaggtcttacaatggaagtgccctattacattttgttcttttctatgatttccaattattttatgaaatttttcatttattttttctgttctttctatctttaatttctatgtaactttttgaaatagatctcaaagattttatatatatatatatatatatatatacacacacacacagagagagagatatatatctactgtactattgaagtagattcctaaagtttttatctcttctagaatattggtttcacaacacccctattatgtgtatttaattttacccaccacatggcgttttcaaaaagtctttatttggcggaatacaacttcagaatctgattcgaagagaaaattgctcacagccgtgagccactgtgcctggccgatttttactatttaaagaaggaagaattttagcagcgtggggtggctcatgcctgtaatcccagcactttgggaggctgaggtgggcggatcacttgaggccagtagttcaagaacagcctggccaacatgacgaaaccccatctctactaaaaatacaaaaattagccaggcgtggtggcacgtgcctgtagtcccagctactcgaaggcttaggcaggagaatcgcttgaatcagagacagggaggctgcaatgagccgagattgcaccactgcactccagcctgggcgacagtgcaagactccatctcaaaaataaagaggaattggaggaggaaataaatgaataaatgacaaaggtgacaaaggaccaaagatctgtgacttgtgcaaagattgctctgtggtaattattacagaaacaatgtttgtatcttattttttagggaattttgtatattgtctaatctgatttactttgtttttaatagtttgctgcaggtctagaagatgtcacagaatttcaaggaagagaggtgagcagctgctgtggtgattttgaaattgtttgtgtgtgttgtggccagtgatgtcagaatttcaggatctgagagttcatgattttagaggctcaaaggagaatatttttataacttttttctataatttttttataatttttttatatattttttataatattttataattttttttgctatgtgagtatccctactttgttcaaggaatctcattatcttttccctttttttaaaaagggatttttttgtagtaacctgaataaattgggggaagtattgatatatttccttttctcaccattttttgttggatgaaaataatcttttagtgaaattcagtgtattaaatatttattttttaaagtctagagatggggtcatgctgtgtttcccaggctgcccttgaactcctgggctcaagcaatcatcttgcctcaacctcctgagtagctgggactacaggcatgtgctgccatgcctggcttaaatatttaaaaaattttatctggcacattctgaacacagatgtttctacttatatttgtcatgtagtcacagtatatattgattttgctacctcgcctactcctaaaagttttaattcatttaattggtcttaattggacttaaaaattttttccctggccgggcgccttggctcacgcctgtaatcccagcactttgggaagccgaggcaggcgtttgagaccagcctgaccaacatggagaaaccctgtctctactaataatacaaaattagctgggtggggtggcacatgcctgtaatcccagctactcaggaggctgaggcaggagaatcacttgaacccgggaggcagaggttgcagtgagctgaaattgtgccattgcactccagcctggacaacaagagcaaaactctgtctcaaaaaaaaaaaaattcccaatagattttaatctaattttattagaacaattcagtcatatgttttttcatgctatgtatatgagagttccattattcagatactaaacaaatgtctactgtacatttactcttctcactgatgatggattagataaccatgcacaaaataagcctggctgtggaaatgcttatttgttgggagggtgcttgtttggatcgatgatgagaataattgtctgaggatgctgagggactcattccagatgtcaatctgaggtccagatgtgtggccctccaataggacaaataagactctcagagcctggctctatttggggatccctcagtgacaacatagtacctctgtgagcgtgccttttctatctctccgaagagggcattagcatcctgtcttatgagtcagtatgcactttagtatggttagtgacccaagactcactttattttgttcattttgagcagagaattgtagatagatacatatatgggaaatatgttcttgattaacaaatgaaaaaatgaaaaagtttcagtcaagaaaggtcaaggaactgtgatgtatagtgaaggcagggaacactgcatgcctgtattaaatattgacaaaggaaccaattttagtgctttgttatttttactgttgagtattttctgagaccatttctttttcttctattttgttttgctgaggtagaggagggctggaatgaggtcctccacttcagaaaataggggtgagtagttaaaccaacatcctttggaattcatatacgtcatgcgttccatgccacatcctgagatctttttgttgatttttttagtggcttactggataatatctaaatactgtatattttactttggtgagtctctccaccttcatttctgaatcattgtcctttacatttttattctatttgaattttgcatgaaatgacaaatgtagaattttgcccaatttattttatttattcatttatttatttgggaagacaaagtctctctctgtcacccaggctggagtacattggcccagtcagagctcacttcagctcttcaccctgtagcccttaactcctgggctcaagtgatcctccaccctcagcctcccaagtatctaggaatacaggtatgtgttaccacacatagctaatttttaaattttttattttgtgaagataggatcttactgtgttgctaaggctggtcttgaactactgggctcaagcagtcctcttgttttggcttcccaaagtgctaggattacaggcaggagccaccatgcctggcatcattagggatattggtctgtgattcacttttgatgatgtctttggttttgataaaaattagggtaatagtagactcatggaataagttgggaaatgttttctgctctcctgttttttggaagagttgtgaaggattgatgttatttctttaatgatttggtagaattcatcagagaaatcatttgtgtggaattttatttgtggaaacttgagtagctaattcaatctcttgttaaaggtgacttcaattttctgtttttccttcttgtgacagttcctgtaatttatatatttctaggaatgtgcctatttaatctaggttatgtaatttgttgacataacttgtttatataagggtgttagtctgattttcatcccagattttatgaaaattgggtcttctgttttcagtagtgtagatatagttatgtcaattttttaagagacagagtcttactgtgttgtttatgctggccttgaacttctgagcctaagcaatcctgctacctctgcatcttgagtaggtgggagtgtgggaacacaccaccacacctggcctgtcactaaacaaacaaaaaatttcagtgaaccagcttttgatatttttatttttcttctgtattttttattttatttattggcattttattcttatatcttttattctacttgatttagctttgctttgtttttctgttttcttaaggtaaaagtttagattattgatttgagattttcctttttttaatatggacatttacagctataaatttcccaaagaactcttttagctacatatatattttcttttgttgtgttttgtttcctttgatttcaaactattttataaattttcttatttctcccaagaactcccaatgattcttagtaatgtgttaatttccatatattgtgaattccccccaatttttttcctttatttctgatatgattctattgtggttggacaccatacttttctgatttctttactttcagatttgttgataccagtgtgtggtctaatacctaccctgcacactgttccatgtgcacttgaaaataatatattttctactggttagattgttccatagatggatgttatgtaactgttttatagtgttgtttgtcttctatttccttgatcttctgtctcattgttatgttcatcattgaaagtgaggtattgaaattttcagttattataatgtttattttgccttccattctgtcatttttaaaatttaatttgggggttatgttgttggatgcacgtatctttattattgttatatcttcctgatggattgacagtttaatcatcatgaaatgtcctttgtctctaccaacaatttttttttttttgagatggagtctcgctctgttgcccaggctggagtgcagtggcaccatctctgctcaccacaagctccgcctcctgggttcacaccattctcctgcctcagcctcccgagtagctgggattacaggcacctgtcaccacgcctggctaattttttgtatttttagtagagacggggtttcaccatgttagccaggatggtctcgatctcctgacctcgtgatccacccacctcggcctcccaaagtgctgggattacaggcgtgagccaccgtgcctggccctctaccaacaatttttatcttgaaatttatttagcctgataattgtagtttttgtctgacttatagcccataaactctctctggttactgtatgcagtttatcttgtcattattttactatctacctatttttaattaaaacaaaatatctttgagacaggatctcactctctcacccatgctgtagcgcaatggcatgatcatagctcactgcaacctgaaactcttgtaattcaagcaattcttccacctcagcctcctgagtatctgaaactacaggccaacaccaccacacctggctaatttttttgtattttttttcttgtagagatgaaatcttggtatcttgcccaggatggttattttctacctattttttgtccttgaatctaaagtgtatcttttgtagagagcatatagttgtatcatgtgtttttttaaaaagatacatctctgccttttaagtggagagtttacttcatgaacatttaatgtaattactgataaggtaaaattcacatctgccattttctattttcttttatggcatatatctgttttgtttttcttattgttctttatgttaaataagtaatagtgtactgctttaattttctttttaattttttgtgtttacttattagtggttgcctttgagattatagttaatttgttaatttataatatagcttagatttaatagttaattttaatagtacacagaaactatttttcaatatagctctgttttctcacccttccttttgtatattattgtcattcaaacatttataccatcttttatatttgcctaataattattttactggtcctgtgcatttcttcatatggatcaaagttaatgtctagtgctatttcacttaaggctgaagtctccatttaatttttctggtaggataggtattttgacaaattcagcttttgttggtttagaatgtcatttcttttttatttttgaagagtacttttgctgtttcaagatctatgggtagacagtcttacttctttttctttaaaatagtttgaatatgttatcttactgttttatggcttcaagagtttctgatgagaaatcagctgttagtctcattgaggattccttgtacctgatgggtttgtttttctcttcatattttgaagactggcttttgaaatttttactatgacgtctccatgtctttatgtgtatctcacttgagtgagtcaagttcatttgactcattttatatgtacatgtatgtttttcccttacattaaggaaattttaggcgtttgttcttcaaactgtttctgcccttctactgtgacttttatgaacatgttgatatgctgtgttcctcagttctctgaagctgtttttcttttttctttctgcttcacagaatggatctcctcaactgtcctgtattcaaattcgattaccttttcctgctagctcaaatagtgtgattaaatttttctagtgaatttttattatttatttctctgtatctttattgtctagtaattgatacatttttaaaaaatttaaattttaggtttaggagtacatgtgcaagtttgttatataggtagattgtgagtcatgttggtttggtgtacagattatttcattacccaggtaataagcatagtacctgataggtagttttttgatcctcactctcctcccaccttctaccttcaagtgctcccagttacaagagagaatgtatggcatttagtttactgttcctgcatcaatgtgcttaggattatggcctccagctctattcatgttgctgtaaagaacatgatttcattcttttttcatggctacatagtattccaaggtgaaaatgctccatattttctatgtccagtctaccagtgtgatagttaatattgagtgtcaacttgattggattgaaggatgcacagtattgttcctggatgtgtctctgtgaaggtgttgccaaaggagattaaaatttgagtcagtgaattgggagagacagattcaccctcaatctgggtgggcacaatctaatcagctgcacagtctcatcagctgctggtagaataaagcaagcagaagaatatagaaggactagactgtctgagtcttccagccttcatctttcacccatgctagatgcttcctgcccttgaacattggacttcaagctcttgtactcttggacttacaccagttgtttgcaaggggctctcaggccttcagcccacactgttggcttcccgacttttgaggttttgggactcagactagcttccttgctcctcagcttgcagaggaactattatgggacttcaccttgtgattgtgtgagtccatcctccttaataaactcccttttatatatacatctatcctattagtcctgtccttctgggaaaccctgactaatacaaccagtcctgggtacctgggttgattgtatgtctttgctcttgtgaataccacagtgatgaacattgaagtgcatgtgtcttttggtagaatgatttattttcttttgggtatataccagaaatgggattgttgggtgaaactgtagctctgttttaagttatttgagaaattctcagactgttttcctcagtgaccggactaatttacattcccaccaacagtgtttaaacattcccctttttcttcaggcttgccaggatctttctcttttttgcttttaataatagccattctgacgttgtgagatactatcttattgtggggttttttttgttgtcgtcgttgtttgtttttcgagacagagtcgcccagggtggagtgcagtggtgtgatctctgctcactgcagcctatgcctcccgggttcaagcgattctcctgccttagagtcccaagtagctgggactgcaggcgtgtgccaccatgcctggctactttttgtatttttagtacagatggggtttcaccatgttggccaggctggtctcgaactcgtgaccttgagtgatccaccaccatggcctcccactgctgggattacaggcatgagccaccgcatcgggcccttatggtggttttgatttgaatttctctgatgattagtgatactaagagcattttttcatatgtttgttgaccattctatatcttcttttgaaaagtgcctcttaatggggttgatttttgcttgttgatttatttaagtgccctatagattcaggatattaggcttctgtcaaatgcatagtttgtcaatgatctctgttcgccaatgatatggttctatacctagaaaatgccttctttaagaaaataaaattgtattttgtggatgtatcacattttccttatatatctgctttgggcatttgggttgcttctgcctcttgggcattatgaataatgctacagtgaatatggatatgcagatgtatgtttgagatcttgctttgaattactttggatatatacccaaaagtgggattcctggatcatatggtaattctattgttaatttttcaggaacctccatacatttttccacaatggctgtaccattttatgttcccatcaacagcatgcaaaggttccagtttctccacattgtcaccaacacttgctgttttttatttcactcttgttgcccaggctggagtgcaatggcactgtcttggttcactgcaacctccacctcctgagttcaagcgattctcctgcctcagtctccccgagtagctgggattacaggtgcctgccaccatgcccagctaatttttatatttttagtagagacagggtttcaccatgttggccaggctggtcttgaactcctgacctcaggtgatccacctgccttggcctcccaaagtgctgggattataggcctgagccaccacgcctggctcgttgtttttcaattgtatcttctaatggatgtgaggtgatacctcattatggttttgatttgcatttgtttagtaattagtgatactgagcatgttttcatatacctgttgtccatttgtttatcttctttggaaaaaaatctattcaattactttgccccttttttaaaattagggttttttgttgtaatctgagtttgttccctccctccctcactctctccctccctctcttccctccttccctccctccttccttccttccttccttccttccttccttccttccttccttccttccttccttcctttcttccttccttccctccctccctgtctccctccctgtctccctccatgtctccctccctgtctccctccctccctcccttcttttctcccttcctccctcccttcctccctccctttctcccttcctcccttccttgatcacatccacatccttccttccttcgtgctgtgttgctcagcatggagagcagtgccaaaatcatggctcactgcagcctcaactttccaggtgccagagagcctcccacctcgtgctcgtgggaccacaggcacatgccaacacgtctagctaattgttttttaatttttattttttggtagatatgggggtctcactgtgttgcacaggctggtttcaaactcataggctcaaggaatcttcaaaccatggcctctcaaagtgttgacattacaggcatgagttaccatgcccatcctgcatgtgaaagccttacgagatatgatatgcaaatatttctctcatttggtacgtttcctctttcattctgttgattgtttcccttcatgtacaaacattttaggtttgatgtagtcttgcttgtctgtttttgcttttgttggttatacttttagtgtcacattcaaaaacttattgacaaaaacaagaagggtttccatgtgttttcttctagttttacaatgtcaagatgtatctttaagtacttaatttattttgagttgatttttgtgtatgttgtaaggtaaggattcagtttactttttttttttaatttgcggatatccagtatgccaaatatgattagttagataaactgtgctctgagcacccatgtcaaagataaattgagtagagtacatggatttatttctgcattcttcattcttttccattagattatgtctgttttttgccagtattctagtattttgaattactatagctttgttatatacttggaaatcaagaagtgcctccacctttgtgtttcatgctgaatattgatttagctattttggttcttttgtggatccagataaattgtatgatttttttctctatttctggaaaaatgtgattgtgattttgataggaattatagtgaatcagtagataactttgggtagtatggatattttgacaatattaattagtcccagtggtggtgttgaggccgtgttgacctggaggcactggggtcagtgatagtgttgtcaagttggctgcaggatgggatggtgcctgggaggtcagtgcataaaaatcctatggatgtgatcaaggaaagggtgatggaaggtgatgtgtcctgtctgcttggtccttgtaggatcaggcaggacatcctgtaataaaaggagacattaccttcggatgtcctgagggcatggtgcaggcaccaggactgagtggaggggaggaagctcatgtcttgaggtcctttggctacatggggaagactgtctctgggcttgatgctgagttccagactgacgtgctggctgttgtgatggtgctctccagtgctggttgtggttggtttttggctaggtacacctcacctgggacagtggccaaagacagtgtcagttccagacatcagaagccccatgaggaagagcatgtgctcgcgccaggagtggtggctgttaggggagggacctcagacctatgtctgcatggcctgaggtcagagttcacatcctactgattgaagaccttgttcttgagctgtccggttgccacagggtcggacctggaggctgcagaccatcgtggccctttgcagtgttcggaaacatatgcgcaccccagggagggacacacacacacacacacacacacacacacacacacacacacacgcaaactcacaaacacaacacacagacagaaaatgacaaataaacacacacactcacacacacacacacaggagcccacagaaaaaagcaaatagacgcagaaacgggcacgtgcagtagttctggccacacatgttccctaggtatccacagaatggcatgggtattgtatattcataaagatggagatcagtcatggaggccaaggacaagtaggtgcactggttgaactacagtagagaatggcatggaagtggtgagcaatggacctgggcctgtttctcaagtgtgtatttgatttctttacaattccccggagaagttgtcatgggaggccagccgcctgctggcaaggaagatggttgattcttctgatcaatggaggccctgcagagtcctgtagtcactgtggcctggcatccatggtgcacccaatgctggtggatggcttaggacggtaagcattcctctgccccacgtgctgaatgagagtggcttttggatgtcctataccttcaaggagctgtttgtcagcagcgaatgacatggcaagttccactcctagagtggatggtctgtgcccattgctcagtggtgcagctctggcttccccagcatgctgaatgtctttaaggtcatcagctcgccccttcccagcctgtggtgtcaaatgtcttgccccttgtcaaatgtgcttggatcgatgatgagtcccctataaaaacattccttggaaaagctgaacaaaatgagtgagaactcataacgtcattctcatcggaactgaggtccagcatgttgcttcctctggggcctgtaggagtgagggacaacttccactgattcccataggttccaccacccagggcatccacagacaaaagtctcgtgtcacaggcacgttaggaacattccctctgtgtgaggtacatgggtgggagagtgatgggggattcggccgctctgtgatggcgtggtggccgtggaagcaggcagaaatgttgcaggcctaggggaagtggaaatgttgccagcacaggggtgtgtgctactggtaagctcccagaaggaagacccggacctcacagtggtcatctcagtgcagaagaccaggtgtctgttttcatgtcgaggagagcccaaggcccagacctcaggcagaccttggtgttgatttttgattagttgagaacaggggagtgccaaggtgttaggggagagtgcagagcaataggtgtcggggcaaacagtgaaagcctcttcagcctaccctgcagcattggtcaccaggagccctcctggaagggatttctttgcctcctgagctgtgagatgcctgtggtgcagtggcagaggcctaggtaggaaggtactccaggggaaaggtggtagagggatcacatggacatgagtgtcattagcaggcttgggctgtcattcaggggtgatgggcttcccatggatttttctggtggaagacaggttggccagcaggggtcttcgaggccaggtcctggggagcacgaggatcgagttggtgcccgtggccctgggtcacttccagtcttcccaggagagtaatgggctcctccattgtgcaaatcttcctataaatggtctcttggcccgccattattgggcggctccacctgctgcagcttgtatgagcaaatactgctctggatcctctttcctgcttggaaagcagcttcagtcctgaaggtccagagtgaatgtgccctgaccctggctctggcccaagtctgtgccgtaggtactcgtcacacttggagctatccatggaggtctgtgtgcattccaggcaacacgggtgcaatcccaggggtgctgccacagagtccttttacttgggatgcctcacacctctgcatgttggcaatatttaagtgttggagtccactacaccctaggggtgatgaactgttttggctcccttaaccggtttgaagtctcagcgcagccaggacagccatgccatgttgaagggcatgcagatggcttaggaatgttggaaaggatgggtggttctgagctcgcagctcactcactagctgcatgcatgtagacccagtggtggtgttcaggtagtgttgactttgaggcattgcggcgggtagtagtgcagtcaagttggctgcataatgggatgttgcctcagaggtcagtacaggatagccctgtgggtgtgtccaatgcaaggaaaatgaaaggcagtgtatcccatccgcctggtccttgggacatcggtaggggggacgtcccattggaaaagcagccattccgtttgtgtgtcgagagggcatagtgcaggcacatggactgagtggaggggaggaaggctgtgtcttgaggtcctttggctagattgggaagaccacctctggccttgacgccaagtttcaggctgatgtgctggccattgcaaaggcgccctccagcacaggttgtgattggttttccaccaggtacgcctcacctgagagggcggctagagacagtgtctgctcaggacatcagatgtcccgtgaggaggagtgtgtactcacaccaggggagttgactggtaggcgagccaccttgggcctatgtccgcatggtctccaggtcaaaattcacatcctactgattgaaggccttggtcttcagctgttgggttggcgtggtgtcaggccaggaggctgcagactatgactgcctgttgcagtgttgggaaacacacatgttaggaaacacatgtgcatgagggagacacacacacacacattcatacacacacacacacacacacagaggcatgccgagccacaggcaaatacatgcagcaatgggcgtatgtgaccacgtgcacttttaggtatccacagagtaacacatgtaagatatattcatggagatggaggtcagtcgtggaagccaaggaataacgggtgtgcaagttgcccaacgggaaagaatgggattgaagtgttgaccagtggacctgagcccatttctcaagcgtttatttgatttctttacacttctcagaggcagttgctgtgggaggtgtggtaactgctggaaggaagatgctcaattcttctgagcaacgaaggccacacggagtcctggattctgtgtggcctggcatccatggcgcactgtgtgctggcaggtggctcaggacggtaagcatttctctgcccagtatgctgaatgagggtgtctttcggatttccaagacccgcaaggagcagtttctcagctaaccactaatggcatggcgagttcctctcctagagtggatagtctgtgctcattgctcagtggcatcgctctagtggggccgaaggtctttaaggtcattggctcacccactgcccagcctgtggtgtcaaatatcctgccccttgccccttcaaatgtgcttggatcgatgatgagtccccaaaaaaaacattccttggaaaagctgaacaaaatgagtgaaaactcataccgtcattctcatcggaactgaggtccagcacgttgccttccccggggactgtaggagtgagggacaacttccactgattcccataggttccaccacccaaggcatccacagccaaagtctcccatcaaatgctcattaggaacattccctttttgtgaggtacacaggtaggagagtcctggggggaacggctgctctgtgatggcctggtggccatggaagcagacagaaatatcgcaggcctagggtagtgtgcgcctgatcttggcttggtgagctcctaggaagggagacgcggacctcgtggcaggcgtctctgagcagaggactgagtccttgttttcttgccggggagagcacaaggcccaggcctcaggcagatgttggtcctgatttttgattagctgaggacaagggagtgccaagggtgatgggggacagtgtataacaaagggtgttgtgacagagagccaaagcctctttggccctccacccagcatccagtcatggaggccccccagcagggatttcttcatcccctgagccgtgagatgcccctggtgctatggtggaagcctggactggaaggtactccacagaagaggtggtagggggcttatgtggacatgtgtgtcatcagcagtcttgggctgttgttcagcgttgatgggctttccatttatttctctagtggatgacaagttggccagcagaggtgtcagagggcaggttccagggaatacaagggtcagacttgtgctcctggcccttggtcacttctcgtcttcctgacagagtagtgggctccactgttgggcacatcttcctggaagtcgtctcttggcccgccattgccgagcggccacacctgctgcagctcgtgtgagcaaatatggctctggatcctctttcctgctttgaaagcagcttccatcctgaaggcgtccagagggtatgtgtcctggccctggccaggaactctgctgtgggcattggtcacacgtggctatccatggagatccgggtgcattccaggcaacattctaggggcctgccatggagagttcgttgacttgggatgcccctgcacctcccatgttggtgatgttccagtgttgcattctgctacaccctaagggtgatgaagcatttcagctcccttaaacagtttgatgtcacagtgcagccaggacagccatatcatgttgaggggcccacgactgcattaggaatgttggaagggattggtggttctgcagatcgcagctcattagtagctgtttacttgtagacctggtgatggtgctgaggcagtgttgacttgcaggagttgggatgggtggtaatgcagtcaagttggctgcatgatgggatgttgcctcagagttctgtgcagagaagccctgtgggtgtaaccagtgcaaggaccatggaaggcagtgtgtcctgtcaacctggtccttggggaagggacgtcctgttggaaaacagccattcccttcggttgtcctgaaggtgcagtgcgggcatgtggactgagtggaggaagcccgtgtcttgagatcctttggctaggttgggaagattgcctctggcttgatgccattttcagacctatgggttggtaattgtgaaggcgccctcacgtgctggttgtggttggttttccgccaagtgagcctcacctgggagtgcagccagagacagtgtcaggtcacaacatcagatgccccatgaggaggagcatgtgctcactccaggggtggtggctgttaggtgagggacctcaggcctatgtcctcctggcctgattttacatcctactgattgaagaccttggtcttgagccttcgggttgcaggggcttcaggtctggaggctgcagactatggcctcctgttgcggtgttgggaaacacatgtgcatgagggaaacacacatacactatcacacacacaaacaggcgctcacagccacaggcaaatatacgtagcaccacgtgcgtgtggtcgttccggccacacgtgcttcctaggtgtctagaaagtgacacagtcagatacatttataaagatggaggtccataatggaggccaaggagaagcgggcatgtgtgttgctctgtggaagagagtggcgttgaagtgaccagtgaacctgggcccatttctcaagcatgcatttgatttctttacacttctcaggggcagttatcatgggacacccgccatatgctggcaaggaagatggtcagttcttctgagccacaaaggcccccaacatcctggagttggtgttgcctagcatccacggtgcgccccctgctggtggatggctcaggatggtaagcattcctccgccgcacatgctgagtgggggtgggatttccaagacctgcaaggagctgtttctcagcaggccactgatggcatggcgagttccactcctaaagtgaacggtctgtgcccattgttcagtggtgcagctctggcttccccagcgtgcggagggtttttaaggtcatcggcttgcccactgcccagcctgtggtgtcaaatatcctgccccttcaaatgtgcttggatcgatgatgagtcccccataaaaacattccttggaaaagctgaacaaaatgagtgagaactcataccgtcgttctcatcggaactgaggtccagcacattgcctcccccggggactgtaggagcgagggacaacttccactggttcccagaggttctaccactcagggcgtccatggatgaaagtctcacatcacaggcacaatagaaatattccctctgtgtgaggtatacaagtaggagagtcatggggggattggctgctctgtgatgtcgtggcaactgtagaagtgggtggaaatgcagacctaggggagtgtgcggctggccttggcttggtgagctgccaggaagggagaccctgacctcctgatgggcctctctatgtggcggaccaggtcttttttttatgccaaggagagcacaaggcccagacctcagacagaccttggtcttgattttcagttatctgaggagaggggagtgccaaagtgatgggggacagtggagagcaatgggtgttgtggcagacagccaaagcctctttggccctccccccagtgttggttacaggggcccctggcagcaatttctttggctcctgagccatgagttatccatggtgtggtggctcagcctgggcaggacagtaccccagagaaaaggtggtagagggctcacatggacacgcgtgtcatcagtggtcttgggctgtcatttggcagtgatgggctttccatggatttctattgtggatgacaggttagccagtggggccttcaagggcagatccaaggagcatgagtgttgggctgtagcccgtggccctcggtcacttctggtcttcccggcagaatagtgggctccaccgttgtgcacatcttcctggaaatggtctcttggccctccattgctgagcagccccacatgctgcagctcttgtgagcaaataactgctttggatcttccgtcctgctttgaaagtggcttccatcctgaagactttcagagggaatgtgccctggccctggccctggctcggaactctcctgtgggattcggtcacacttggagctgtccatgggggtctgtgtgcagtccagacaatgcatatttaatcctaggtgccttccatagagagtcccttgatttgagttgcctctactcctctgcatgttggtgatactcaagtgttggatttagctacgccctaggtgtgatgaactgtttcaaccccgttagtctcagcgtagccaggatagtcatgccatgttgaagggcatgcagatggcttaggaaagttggaaaggattggtcattctgcggctcgtggctcacttagtagccatgtgcatgtagacctggtggtggttgtcagatgtcgttgagcaggtgttggggaggatggtcctgcatccaagttggctgcgtggtgggatgttgcgtcggaggtcggtgcaaggaaggcctttgagtgtgatcgatgcaaggatgatggaaggcactgtgtcctgtctgcctggtgtttggggcgttaggcagggatgtcccatgggaaaagcagccattccctttgggtgtcctgaggacatggtgcaggtacatggactgagtggaggagaggaagcccgtgtcttgaggtcatttgcctaggttgggcagactgcctgtggccttgatgctgagtttcagagtgacgtgctggccgttgcaaaggcgccctccagtgctggttgtgtttggttttgtgccaggtgtgcctttcctgggagtgctgccagagacagtgtctggtcacgacatcagatgccccgtgaggaggagcttatgctcaggctagggatggtggctgttatgtgagggcccttgggcctatgtctgcatggcctcgaggtcagagtttacatcctgctgattgaaggccttggtcttgaattgttgggttggtaggggctcaggtctggaggccgcagactatgactgcatgttgccatgttgggaaactcgtgttgggaaacacatgtgcatgagggagatacacacacacacacacacacacacacacagccactcagcaatgtgtgtgtgcgcggtcggtctggcgccacacacagctccaagctgtttgcagagtgccactggtaaggtacattcatggaaacagaggtcactcatggaggccaacagaagcaaggcgtgcaagttgccacgcatgaaagaatggcactgaagtagtgaccagtggacctgggcctgtttctcaagcgtacatttgatttctttatacttctcaggggcagttgccgtgggaggcccgctgcctgctggaaggaagatggtcagttcttctgaaccacaaaggccctgcagagtcctggagtctgtgtggcctggcttccagggttcacctcatgctggtggattgctcaggatggtaagcattcctctgccccatgtgctgagtgacggtgtcttttggatttccaagacccataatgagctgtttctcatgaggccactaatggcatggtgagttgcattccttgagcaaatggtctctgccttttgctcagtgccatggttctatcttccccagggtgccgaaggtctttaaggtcgtcagctcacctactgcccagcctgtggtgtcaaatgtcctgcctcttcaaatgtgtttggatcgatgatgagtccccccaaaaaaacattccttggaaaagctgaacaaaatgagtgaaaactcataccgtcgttctcagcggaactgaggtccagcgcgttgcctccagcagggactgttggagtgagggagagcttccactagtccctataggttccaccacccagggcatccgcaggtaaatgtctgccatcacacgcacattaggaacattccctttgcgtgagatacactgttaggagagtcacggagggattggatgctgtgtgatggcgtggcagctgtggaagtggacggaaaaatctcaggcctagaggagtgcgtggcactgatgagctcccaggaagggagacccggaccttgtgtcaagcttcctcgcacacaggaccgggtcctggttcccctactacagagagtatgaggtcccagcctcaggcagaccttggtcttgattttcagttagctgaggacaggggagtgccaagggtgatggggaagagtgcagagcaatgggtgttgtagcagatggccaaagcctcttcggcccttcccccagcgttggtcccagggtcaccccagcatggatttctttgcctcctgaaccgtgagatgcccatggtgtggtggtggagacctgggtaggacatattctctggtattccagagaaaaggtggtagggggctcacatggacaggtgtgccatcagtggtcttgggctctcatttggtggtgctgggctttccgtgtattcctctgatggatgacaggtcgggcagcaggggtcttcaagggcagttcccaggcgtgtgagggttgggctgctgcctgtggccctgggtcactccgatcttcctggcagagtaatgggctccaccgttgtgtacatcttcctgtaaatagtctcttggcccgccattgccaggcggccccacctgctgcagcttgtgtgagcaaatactgctcttgatcctttttcttgctttgaaagcagcatccgtcccaaaggcatccagagggaatgtgccctggcccaggcccaggaccctcccgtgggttccaatcatgcatggggctgtctgtggaggtccgtgtccattccgggcaatgcgtgtgcaatcccaggggtgttgccacggaaagtctcttgacttgggatgcctccacgcctctgcatgttggcaatgttccagtgttggattccgctactccctatgcatgatgaagcattttagctcccttagccagtttaaattcacagtgcagccaggacagccgtgccactttcaagggcacttggttggcttaggaaagttggaaaggattggtggttctacagttctcagttcacttagtagctgcatgcatgtagacctggtggtgctgatgcagtgttgacttgccagtgttggggtgggtagtagtgcagtcagattggctgcatgaggggttattgcttctgaggtcggtgcagggatgccctgtgggtgtgtccaattgaagaacgatgacaggcagtgtgtcctgtcaacctggtccttgggaattcaggtagggacgtcctgttggaaaagcagccattctctttgggtgtcctgagggaacggtgcgggcacatggactgagtggaggggaggaggcatgtatcttgaggtccttttgctaggttgctagtcctacctctggccttgatgccaagtttcagactgacatgctggactttgcaaaggcgccctctggagctggttgtggttggttttccgccaggtgcacctcacctaagagggtggccagagacagtgtcttgtcatgacatcagaagccccatgaggaagaggaggagcctgtgctcctgccagaggtggtggctgttaggtaagagacctgtgacctgtttccacatggcccggaggtcaaagttcacatccagtgatcgaaggccagggtcttgagccatcggattgctggggggatcaggtctggaggctgcaaactagaactgcccattgtggtgttgggacccacatgtgcattagggagacaaacatgcccatttaaactaacattctcacacatgcacacacccacacccacccatacacacacactctcatacactcacactcaaactcacactctctctttcacacacacacacacacacacacaggcacagacagccataggctaatagatgcagcgatgtgcacatggtgtggttctggccacatatgcttttaggtgtccacagagtgacgcaggtaaggtatattcatggagctggaggtcagtcatggaggccaaggagaagcaggtgtgtgagttgccctgtgggaaagaatggtgttgaagtgtccagtgaacctgggcctgtttctcaagcatgcatttgatttctttacacttctcagggacagttgccgtgggaggtccgctgcctgctgtcaaggaagatggtcgatgcttctgagaaacaggccctgcgggttcctggatttggtgtggcctggcatccacggtgcaccccgtgctggcgggtggcccaggacggtaagcatttttctgccccgtgtgctgagtgatggtgcctttagaatttctgagacctgtgagcaacagtttcttggcaggccattaatggcatggcgagttccattcccaaagtggatggtctgtgccggttgttcagtggcgcggctctggcttccctagggtgccaaagttctttaacgtcatcggcttgcccactgtctggcctgtgggtgtcaaatgtcccacctcttcaaatgtgcttggatcgatgatgagtcccccataaaaacattccttggaaaagctgaacaaaatgagtgagaactcataccgtcgttctcatcagaactgaggtccagcacgttgcctcccgtggggactgtaggagcgagggacaacttccactggttcccataggttccaccaccgaggacatccacaggccaaagtctcccatgaaatactcgttaggaacattccctctgtgtgaggtacatgggtgggagatttgtgggggcactggctgctctgtgatggcgtggcggccatggaagaggggagaaatgtcgtgggcctaggggagtgtgtggctggtctcagcttggtgagctttcaggaagggaggcctggacctcatgggtggcatctccatgcagaggacaaggtctcacttttgctaccaaggagagcacaaggtccaggcctcaggcagaccttgttcttgatttctggttagctgaggacagggaagtgccaagggtgatgagggagagtgtggagcaatgggtgccacggcagatggccaatggctcttcagccctcctgccaatgttggtcacagtgtccccccagcacggatttctttgcctcccgaaatgtaagatgcctgtggtttggtggtgaaggtgtaggcagggtggtattccagagaaaaggtgctagagggctctcgtggacatgagtgtgcattgggctttaatttggcagtgataggctttccatggatttctctggtggatgacaggtcagccagggtgggtctttgagggcatgtctctgggtgagtgagtgtgaggatggtgtccatggccctgggtcacttctgttgttcccagcagagtagggggctctactgttgtgcacatcttcctggaaatggtctcttggccttcgttgtcgggtggccccacctgctgctgctctcgtgagcaaatactgctctgtatcattcccgctttccatcccaaaagtgtccagagcgaatgtgccctgtccctggcctgggactctcctttgggctccagtcatgcatgaggctacccgtggagatctatgtgcattctgagcagtgtgtttgcaatcccaggggcattgccacagagagtcttgacttggcatgtctccatgtgactgtgtgctggcgatgttccagtgttggactccaaaagtccctaggcgtgataaagcatttcagctcccttagctggtttgaagtcacagagcaggcaggacagccatgccactttcaagggcatacagttggcacagaaaaattggaaaggattggtggtcgtacatcttgcagctcacttagtagctgcatgcatgtagaccgggtggtgttgatgcagtgttgacttgctggcattggggtgggtggtagcatggtcaagctggctgagtgatgggatattgtctcagaggttggtgcagggaaactctgtgggtgtgtctaatgcaaggataatgacaatgtcctgtctgcctggtctttggggggtcaggtggagatgtccttttggaaaggcagccattctctttgagtgtccagagggcatggtgcaggcacatggattgagtggagggaaggaagcgtgtgtcttgaggtcctttggctaggttgggaagactacctgtggccctgatgctgtttcagagtgatgtgctggccattgcaaaggcgccctccagtgctggttgtggttggttttccatcaggtgcacctcacctggtaaaggggccagagacagtgtctggtcatgacatcagatgctctgtgaggaggagcatgtgctcgtgccaggggtgctggctgttaggcaagggaccttggacctctttcctcatggccttgaggtcaaagttcacatcctattgattgaaggctggggtcttgagtctttggtttagtggggttggttccggtctggaggctgcagactatgactgcccgctggggtgttgggaaacacatgtgcattagggggacacacatccacacagagacacactcatgcacacatgtgtgcacagccacagacaaatagatgcagcaatgggtgtgtgcaatcgttaggccacacacacttataggtgtccatggagtgacacaggtaaggtatgaatgggtctttgaaggcatgtttctgggcgagtgagtgtcgggatggtgtccatggccctgggtcacttctggtcctcccagcagagtagtggtatgaatatggagatggaggtcagtcatagggtccaaggagaagcaggggtacgagttgccccgtgggaaagaatgacattgacgtggtgaccagtggacgtgggcctatttctcaagcgtgcatttgatttctttacacttttcaggggcagttgccttgagaggcccaccgcctgctggcatgacagatggtcagttcttccgagcagtggaatctccatggagtcgtggagtcggtgtggcctcgcatccacagtgcaccctgtgctggtggatggctcaggacagtaagcattcctctgccccgcatgatgagtgagggtgtctttagaatttctgagtcccacaaggaagtttttcagctggccattaagggcattgtcgaggcctttaaggtcatcagctcgcacactgcccagcctgcagtgtcaaatgtcctgcctctttgaatgtggttggatcgatgatgagtcctccaaaaaaaacattccttggaaaagctgaacaaaatgagtgaaaactcataccgtcattctcatcggaactgaggtccagcacattgcttcctctggggcctttactagtgagggacaacttccactagtccctataggttctaacacccatggcgttcacaggtgaaggtctcctgtcatattacaaacattccccccactcccctcccaaaaaaaggaacatttcctctgtgtcaggtacacaggtcagagagtcatagggtgactggctgctctgtgatggcatagtggccgtggaagtggatggaaatgtcgcaggcttaggggagtgtggggctggcctcggcttggtgagctcccaggaagggggacctggaaatcgctgcgggcatccttgcatagaggaccaggtacgtgttccagttctgctttcaaggagagcatgaggcccaggcctcagacagtccttggtcttgatctttggttagctgaggacaggggagtgccaagggtgataggggagagcgcacagcaatggatgttgtggcagacagctaaagcctttctgtccctcctttcacggtcagtcccagggggcccccagcacagacttttttcacctctcgagctgtgagattcctgtggtgttgtggccaagcctgggcaggaaggtaccccagagaaaaggttgtagagggctcacgtggacatgcatgccatcagtggtcttgggctgtcatttggtggtgatgggctttccagggatttctctggtggatgacaggttggccattgggggtcttcaagggcaggtcctagggagcatgagggtcgggctgatgcctgtggtcctgggtcactccattcttcctggcagagtagtagaagtgtccatcttcctggaaatggtctcttggcccgccattgccaggcggccccacctgctgcagctcgtgtgagcaaatactgctctggatcccatttcccgctttgaaagcagcttccatcccaaaggcgtccagagggaatgtgccctggccctggccctggcctgggactctccgatggggtccagtcacacttggcgtattcatggaggtccttgtgcattccaggcaacacatgtgcaataccaggggcactgccgtggagagtctcttgatttgggatgcctcctcgcctttgtgtgttggcgatgttccagtattggattctgctacatcctcagggcaatgaagcgtttcagctcacttagccggtttgacatcatagtgcagccaggacagccgtgccacattggcatggcacatagttgacttaggacagtcggaaagggttggtggttctatgtctcgcagctcacttcatagctgtttgcatgtaaacctggtgatggtgttgagatggtgttgacttgctgacgttggggtggttggtagtgcagttaagttggctgcatgatgggatgttgcctcagatgtcggtgcagcgaagccctgtaggtgtgtccaatgcaaggaaaatgaaaggtggtgtgtcctgtccaccttgtctttaggggttcaggcaggaatgtcctgttggaaaactagccattccctttgtgtgtcctgaaggcatggtgcgggcatgtgaactgattggaggaaggaagtgtgtgtcttgaggtcctttggctgggttcagaagactgtctctggccttgatgccgtgtgccgtgtttaagaccaacgtggtggccattgcaaaggtgccttccagtgcaagttttggttggtttggtgtcaggtgtgccttacctgggagagcggcgagagacagtgtctggtcacgacattatatgccccgtaaggaggactgtgtgcttgcaccgccaggggtgctggctgttagtcgagggacatcaggccaatgtctgtctgacccctaggtcaaaattcgcatcctactgattgaaggccttgggtctcgagccttttggttgcaggtgtggggatggtttccaggtctggaggctgccaactatgacaacccgttgtgctgttgggaaacatctgtgtgggggagacacatacacatagacacactcactctgacatacacacctacacatgcacaggcgtgcacagccacaggcagatagatgcagcaatgggtgtgtgctattgttgtggtcacatgtgcttcctaggtgtccacagagtgacatgggtcaggtatattcatgaagatggaggtctgtcatggagcccaaggagaagccggtgtgcaagtttccctgtgggaaagaatgggattgaagtggtgaccagtggacttgggcccgtttctcaagcatgcatttgatttctttacacttctcagcagcagttgtcatgagaggtctgccgcttgctggcaaggaagatggtcaattcttctgaccaacagaggctgccttgagtcctgatttggtgtggcctggcatctatggtgcacccaatgctggtgagtggctcagggtggtaagcattcctctgccctgtgtgcagaggtgtcttttgaattttgagacctgcaaagagctgtttctcagcaggccactaatggcatggcgagttccactcccagagctgattgtctgtgttcattgctcagtggtgtggctctgggttccccccaggatgctgaaggtgtttaaggtcatcagctctcccactgcccagcctgtggtgtcaaatgttctgcctcttcgaacgtgcttggatcgatgatgagtcccccataaaaacattccttggaaaagctgaacaaaatgagtgagaactcataccgtcgttctcatcagaactgaggtccagcacgttgcctcctctggggactgtaggagcgagggacaacttccactggttcccatgggttccaccacccagggcatttacagatgaaaatctcctatcacatgcatgtgaggaacatttcctctgtatgacatagacggatgggacagttgtggagggattggccactctgtgatgttgtggcagccacggaagcaggtggaagtgttttgacctagggttgtgtatggctggtctcggcttggtgagctcccaggaagggagacccgggcctcgcagcaggtgtctttatgtagaggaccaggtcacagttcccctgccaaggagagcatgaggctcaggcctcagatagaccttggtcttcattttccactagctgataatgggagttccaaggtgatggaggagagcacagagcaatgggtgtcaccgcagatggctaaagcctctttggccctccttccagcatcagtcacaggtgccccctggcatggatttctttgcatccctagccatgagatgaccatggtgcagtgaccaaggcttggccaggatggtaccccagagaaaaggtggtgaagggctcatgtggacatgtgtgtcatcagctgcattgggctgtcacttggtggtgatgggcttcccatggatttctctggtggatgacaggtcagccagggcgggtctttgagggcatgtctctgggcaagtgagtgtcgggatggtgtctgtggccctgggtcacttccggtcttctcagcagagtagtgggctccaccgttgtgcacacctttctggaaatggtctcttggcatgcattgttgggtggccttacctgctgcaactcatgtgagcaaataactgctctggatcctctttcccgcttggaaagcaatttccattctgaaggcatccagagggaatgtgccctggccctggcctgggattctccagtgggttccagtcatgcatggggctatccacggaggtctgtgtgcattccaggcaatgcgtatgcagtcccagcggcattgccacagagagtctctcgacttgggatgactctgcgtgttgacagtgttccagtgttggattccgctatgccctaggcgtggtgaagcatttcagctcccttaactggtttgaagtctcagcacggccaggacaggcatgtcacgctgaagggcacacagttggcttaggaaagctgaaaaggttggtagttctacggcttgcagttcacttagcagaaacgtgcttgtggaccccgtggtgttgagacagtgttgacttataggcactgtggtatgtagtagtgaggtcaagttggctgtgtgataggatgttgcctcagaggtcggtgcagggaagccctgtagatgtgtccagtgcaagaatgatgacaggcggtgtgtcctgtcaaccttgtccttagggggtcaagtggagatgtcctcttggaatagcagccattagctaggatgtcctgagggcacggtgtgggcatgtggactgagtggaggggaggaagcccgtgtcttgagattgtttggctaggttgggaagactgcctctggccttgacactgagtttcaaactgaggtgctggactttgcgatggtgccctccagtgctggttgtagttggttttccaccacatgtgcctcacctgagagggcagccagagagagtgtctggtcacaacatcagatgccctgtgaggaggagtgtgtgctcatgccaggcttggtggctgttaggcaagggacctcgggcccatgtccgcatggcctcaaggtcaaagttcacatcctactgattgaaggcctgggtcttgagcttttgggttgtgaggaggttcaggtctagaggctgcagactatgaccaccccttgtggtgttgggaaacatatgtgcatgagggagacacacatacacacacacacagacacactctctctctcacacacacacacacacacacacacaggcgtgcatagccacaggcaaatagattcagcaatgggcacatgctgtcgtttcggtcacacacgcttcctaggtctccacagagtgacacgggtcaggtatattcatggtaatggaagtcaatcatggaggccaaggaaaagtaggtgtgtgagttgccctgtaagcaagaatggcgttgaagaggtgaccagtggaccttggtctgtttcttaagcatgcatgtgatttctttacacttctaaggggcagttgccgtgggaggcctgccgtctgctgaaaggaagatggttgatgcttctgagcaatgaaggccccatggagtcctggattcggtgtggccttgcatccgtggtgcaccccgtgctggtggatggctcaggacggtaagcattcctctgccccgcatgatgactgagggtgtctttaggatttctgagacccacaaggagcagttcttcagcaggccattaagggcatggctgtggtctttaaagtcattggctcacccactgcccagcctgtggtgtcaaatgtcctgcctcttcaaatgtgcttggatcgatgatgagtcctccaaaaaaacattccttggaaaagctgaacaaaatgagtgagaactcataccgtcgttctcatcggaactgaggtccagcacatttgcctctgccggggactgtaggattgagggacaacttccactagttcccataggttccacctcccagggcatccacaggccaaagtctcccatcacacacaggttaggaacatttcctctgtgcgatgtagacgggtaagagagtcatgggcaaattgtctgctttgttatggtgtggcagccatggaagagtacagaaattttgcaggcctcaaggagtgtgtggctggcctcagcttggtgagctcccaggaagggagacccagatctcgcggcagatgtcactgcacacaggactgggtccgatttttttgccaaggagagcatgaggtgtgggcctcaggcagatctttgtcttgatttctggttacctgaggacaagggagtgccaagttgatggggaagagcaatgggtgtcccagcagatatccaaaggctctttggctctccttccagggttggtcacagggcctccctggcagggatttcttggcctcctgagctgtgagctgctcgtagtgcaatggcagaggcctgggcaggaaagtattccagagaaaaggtggtagagggctcacgtggacatgtgtgtcatcagtggtctggggctgtcatttggcagtgatgggcttcacatggatttctctggcagatgacagctcagccagcaggggtcattgagggcaggtcacagtgaacatgagggtcaggctggcacccacagcccttggtcacttctggtcttcacggcagagtagtgggctccactgttgtgcacatcttcctggaaatggtctcttggcccgccgttgccggatggccccacctgctgcagctcgtttgagcaaatagtgctctggatccactttcccacttggaaagcagcttccatcccgaaggcatccagagggaatgtgccttggctctggctctgccctgggcctctcccatgggctctagtcacacttggggctattcatgaaggtctgtgtgtattccagattccaggcaacatatgtgcaatcccaatggcattgccacagagaatcttttgacttgggatgcctccgtgccactgtatgatggcgatattcaagtgctggattctgctccatcctggggtgatgaagcgtttcagttcccttagccagtttgaagtcacagtgcagccaggacagccatgccacattgacgggcttgtggttggcttaggaaagttggaaaggattggtggttctacagctagcagctcacttagtagccacatgtatctacacctggtgctggtgttgaggtggtgttgacttgcaggcattgttgtgggtgggaatgcggtcaagctgactgcacgatgggacattgcctctgaggtcagtgcagggaagccctgtgaggtgaccagtgcaaggacaatgttaggtggtgtgtcttgtccactcggcttttggggcatcaggcgtggacgtcctgttggagaagcagccattctcttcaggcatcctgagggcacgtgtgcgtacgtggactgagtggagtggaggaagctgtttcttgaggtcgtttggctaggttgggaagaccacctctggctttgacgtcatgtatcagtgcaacattctgagcattgggcaggtgccttccagcacaggttttggttggttttccgccagatgtgccttacctgggagtgcagcaagagacagtgtctggtcccgacatcagaggccctgtgaggagtagcctgtattcgcgccaggggtgtggtggctgttacacgagggacatcaggcctatttccacgtggccttgagatcagagtgcacatcctactgattgaaggtcttgaacctttgatttgttggggggatcaggtctggaggctgcagactataaccgcccattgcagtgggaatctcacacacacacacacacacacacacacacacacgtgtgcacagccacaggcaaatactcgcagcaatgggcacatgaggttgttccaggcacacacacttcctatgtgtccacagagtgacagaggtaagatacattcatggagatggagatcaatcatggaggccaaggagaagcaggcatgcaagttgccccacaggtaagaatgggtttgaagtgaccagtggacctgggcccatttctcaagcatgcatttggtttctttacacttctcaggggcagttgccatgggaggcgcaggcctgctggaaggaagatggtcgattctcccaagcaacaaaggccacgtagagtcctggtttcagtgtggcctggtatccacagtgcaccccgtgctggtgggtggctcaggacggtaagcattcctctgcccttcgtgctgagtgagggtgtctttgggattcccaagacccacaatgaacagtttttcagtaggccactaatggcatgctgagttcctctcctagagtggatggtctgtaccttttgctcagtggcacagctctgggttccccagggtgccgaacatgtttaaggtcatcggctcacccactgcccagcctatgatgtcaaacatcctgcgtctttgaatgtgcttggatcgatgatgagtcccccataaaaacattccttggaaaagctgaacaaaatgagtgagaactcataccgtcgttctcatcggaactgaggtccagcacattgcctccactttggcttattgtggttcacgggtaactgtcatattacatggtacttcactacccaggcactggcattcaatttttgtggtcgttttgaccatagtaaaattctttatcataaatgtatttgagaatcatacttgggtagcccatgaatttttttagtgttactcttcttggtgtcaagttggtttcacccttaatgctaggttttggatttttgttgcatgattgatttttagccaggttctggtcaccaatcacagcctttcaccaacattcatggagaaagtttccttgttttttttatatgttgaggaagtacatatttcctgaatgtttttgcttttgttccaatgttgggctgactggcatgtcatctcttatcttatcttgaactgagtagtggtacaagtttttggctttcagcatccagggcaccaagtcttttgtacacaaattgcaagtattgaagccatggtgttgattgggatgctctacgcccatactctttagtggcatgacgccctcccagggtacccggaatccacatgtgcaactctgtatatgtgtttctgtgaacacagatatgtgaagccatagataagcagatttcatatgtaccacaggagtctatatgacatagccttcctgacctatgtacctgtctgtctttctgaagcacactcatttcctctgcaccttcctggtgtcattggcatggaaggaaggcccttgtccaagaaggatggtcttcgtcttgtgtgatctttgagatgccatgaggcccctggatacaaatggtgtgggctcctttggaggcttttggatttctcctgaatgtaagtgatttcttctgaaagcattctgattttcctcacttgcagggacaaagactatgtgtaggttgatgatgacttacatatatacgttttttttttttttttggaaaggtgaacaaaatgagtgaaaactcagtaccatcatcctcatctaactgaggtccagcacgcttctccatcagggcctagatttagggggccaacatctgtttgttatcatggtgtgcaccaaggcttaggatgtagttgtctttcagtgaaactgagtagctgagtattttgtactcccctggctgagagatacgtttgttgaacgacttacctgtgagaaggtggggtagcatcctgccagtgtgcaggagaaggtaaacctgcaggtgccacaggaaggcggtatccagttgcccacctctgcatggctgggtctgtccttgattcatacctcttgggttcgtcaccccccagaagaagacaatttattccacatgaggagacagcacggtgccattcctgagcacttcttcaactgtctttcatctgtggccggggacatgggacttcttatggtgtttgggtagcatcaagggctggccatcttgaagccagtggtgatgctgatttgctctctggaaaggagcctggagaagctctctacagtgaacttgtacatctataagtagaattccaaatttcatggcccaagaagggtagtggctgtgggaaggggagaggtctgtgtgtgcctttacctggcatcattccatgtgggtcgtggagtgatgactgtgaggctctttaagacattgcagggtgcccaaggtccatttcgtgatatcctcaggatggtttgcttgggagagcctgatgtcatttgcctctgaaccgctcagacatcttgatgcagttggggtttataagagtgtgtcattccccacatcgtggtgacttctacttggaaatgtgacctgcgaaggtctccttgcttatatacctcagcgtctcctgatattagggtattttcaaattcctcctaattcttcacagcagtcttctttgtgaaatagtcgttgtgtggtaggacagggctaccatccacaggccaatgatggataggtgttggactctgatgttatgttcacaggcaagtgccttaagatcttgttttcttagctgcagcaccttagaaatcttgtaggattcagaatgcctggtgctcttctgggtccctgatctgtacctgtgtagtgcacatggaggttgatttgtgatgtttctggatgggaagagtgtgaaggacccaaggggtaaaaatgcctcaaggccaaaggaaagttaacctttgcataggaagaggtttcccctccaaactctcctcactgaagtatcaccatagcctttgtcttctctgatggccaggagaagggtttttgagttggaggtgttataagagtggtgttgagagtgttcttcatgcttagtgctctctagttgatggtgccttcaaaattcatgcctgcctcctaccttcatgtttgggcaaacccatgcatgtgtgcagaaagaaggggagcccatgggaggtagatacagattactccacaacaggacaaatgacatgacccttgccacctatgcacctcactgcctttctcaagcacactgttttgcttctgcacttcttaggtggcgttggtatggaaggaaggccagtgaccgcaagggatgactttgatcttgggagatttttggagatggcaaagtgcttctaaacatgtttggcatggtctccttcaggctggtggatacctcaggatggtaagtattggttttccaaaggcacctaatgttccatgtttgcaggtatgaggactgtgcatggatcaatgatgacttccatacgtgggttccttggaaagttgaacaaaatgagtgaaaactttatactgtcatcctcttcaaactgaggtccagcacactgcttcaacaggggctagagatggaggtctacctctcattcattgacgtgggttgcaccaaggggtctgtccaggcttaggatggggttctcttttggcaaggggtagccccaggggagtgggagctcccatgcacaggagattcctggtgtgaaggacatctcttagtgaggccagggtagcacacacaccatcttcaagactaggtgaatgtgcaggtgacacaaaggacttaggctctgtgtcccccagtttgttcttgagtcttagttcttggttctctcatcatcgggaggaaggcaggtccttctcgttgggaagagaggacaagcctacacttttgcctcatttttggctcatttttatccttgtgtatgtacatagatttctggtcacctgcatgcttcacatccaggccagagtgcctctgttgtaccctctgtgttatgaagacatacagttggcctcctgccctaagctggggctgataggcaacgagtctctggcttatctcaaacctggtgtaggtcaaaggcttcctcgttaggggtgcaggtccccgaggcttttatgatcaactttgcaggtgtgcacgggtgtttaaagggatgctcaacatcagttctctctagtgggattatgtactccatgggctcccaggatccagacgtgcatccctgtgtctatgcagttctgcgtccataaacaggtgaagccagagatgggcagattgcagatgtactgcagggggccagatggcatggccctcataacctctgcacatgtctgcctttctcaaacatgcccatgtttcatctgtacctcccaggtggcgttggcatggaaggaaggactgtgtctgtgagggatgatcatcctctcatgtgatccttggagatgccaggaagccccttgacacatgtggcatgggctccttcagaggcttttggatccgtcgtgaatgtaagcaagcccttcccaaagccctgattttcctcatttgcagaaacaaagattgtgcctggatcaatgatgacttccatatatacattccttggaaagctgaataaaatgaatgaaaactctataccatcatcctcattgaactgaggtcccagcatgctgctacattggagggcaaggagagggggccaacatctgtttgttgacatggtctacaccttggcttaggatgtggtcctctttgggcaaatgcaagcgtctgggctttttggacttctgtagctgagagacagcttggttgaaggaatttcctctgagaaggtggggtaagcacactgccagcctgcagaacttgaagctgcagatggcacaggaagcagtagccagtagtctctttgtgcatgactgtgtgtgtccttgattcatagctttttggtttgtcgcctccccgcttgcacaggaataccattgctttcctttggggagagagcatgtcattcctggacacttgttcggcttactttcattctcagtcgaggatgtgggagttcccatggtacttgggtagcatcaggggcaggcagccatgaggtgggtggtgagctgatttgctttctgcagaggagcccagggagggtatccacattgaactcgtatgtccataggaggaaacccaagtcctttggtccctgcagtgtactggtggtgggaaggggagagggctgtgcatgcatgtaccaagcgacattccatgtgggtcgtggagcaatgactatgagcctcttttgggagttgtagggtgcccatgctccatttcatgatgaccttggggtgctgggatgggaatgagattgcaagtccctgtgttcctgccacttcgcagactgacttggtttgagagatctgtgttcaggaacccctgtgggatgcttgtctgtgttaggcatttgagcagatattggcccagggtttctacccttccatggttgtacatactgctggaagggcttgttgctccctctgtattgatgaggggaagttttgcccaggagagcctgatgccatttgcttctgaactgctcaggcacttcaatgcagttgaggttaagagtgtgtcacttcccatgtcgtggtagcatctactcagaaaagtgacccgtcaaggtctctgcacttaaattctccattatcttatgatgttaggttattttcaaattcctcctaattcttcacaacagtcctctttgtgaaacagtcatgaagttgtatgagggctgtcatccacaggccagtgatggagagttttgtactctgtggccatgttcacaggcaagtggcttaagacgtatcgtgttctcagggacagcaccatagaagccctgtaggattcagcatgtctgatgcttttctggttccctgagctgcacctgtgaggaaggccagaggtggaggttgatgtgtgattgaatgtgtttctcaatgcaaagtgtgtggaaggagcttcaaggccgaaggaaagttgttctttgtgctggaacactttttccctgcagctctccccattgaaatatcctcatggctgttgtcttctctgatggccaagagaatggcttttgagtcaggggtggtgaaagtgtggtattgagagaattcttcgcgcttagtgttctctagtttgatggtgcccttgaaatgcatgcctgccttataccttcatgcctgggtatatctgtgcataagtccccaaagagaggtcacccatgggaggtagatatagaatacagcatggcaggaggaatggcatggcccttgcaaactgtgtacctgcctgcctttctcaagcacacctgtttttcctctgcacttcccaggtggcatgggcatgcaaagaaagacagaggctgcaagggataaacttcatcttgggagatccctggagatggcagggaacccatggacacatgtggcatgggctcctttgggtgccggtggatcccttcatacggtatgtgttcatttctcaaaagaccctaatgttcttcctttacaggaatgaatactgtgcatggaccaatgatgacttccatacatgcattccttggaaagctgaacaaaatgagtgggaactctgtactatcatcttagttgaactgaggtccaccgggggctatagagggacaactgtcattttttttgatgcccgttgcatgaagcattcttccaggcttaggaagggattccgtttgggtgaaggagagtcacaggggagttgaggctatgtgcacaggacttctgtctacaaggctggggtagcacacatgcagtccgtgggactaggtgaatgtgcaggttgctcagggagagttaacctgtagcctgcctctgggtggccaagattgtccttgactcctggctctgggttcccacaacccctggaggaagacaagtaattgtgcttgggaagagagaacaaggccatacttttgcctttctttttttcattcttagtttgagaacagtggagttccaatcacctggcatagctttcatgttgtgttccatgcattgtgagtacatgcatatggcaggaacacacaggttcccactgcaagctgagcctgataggcaaggagtctctagcttaaccccagcccagtgtacgtcaatggcttcctcattaaaattgcatggccctgtagcttttgtgagtgacattataggtatcgatgtaagggtgttgagagggatgctcaatgtcagtgctctttagtgtgctgatgcactactacaagggcacctgagcccttgtccatgcatttctgtgtccaaaatcaggtaaagccagagttgggtatcaaccagatacactgcaggggatcagaggacatggcctttgtgtactgcacatctgtcagattttctcaagcacacccgtgtttcctcttcacctcccacgtggaagtgatgaattggccaggaccatgttggtgagggacaatcatcatctcatgttaacctcagagaagccaggaagctcctggacacacatggtgtaggcttccttggaggctgttggatctctcctgaatgtaagcaattccttcccagtgcaccctgattttcctcatttgcagaaacaaagattgtgtgtggatcgatgatgacttccatatatacattccttggaaagctgaacaaaatgagtgaaaactctataccgtcattctcgtcgaactgaggtccagcacattactccaacaggggctagacagagagggccaacattgattcgttgacatgggtggcaccaaggggaccatccaggcttaggatggggtttctttgggtgaatggtagacacaggggagtaggatctcccatgcacaggacataccttgtttgaaggacttctgtgtcctagggctggataactcatgtgctgtctggaggactaggtgaatggcagattgcatgggaagagttaactggtagcctgcctctgatggccaagtttgtccttgagtccaagctctgggtaccgaagtcccccagaggaagacagatccttctggttgcggggagagcaaaaggctacacctttgccattagttggctcattttatccttagctgaggatgttggagttgtgtttacccggcatagcctctgtgcctatgtgcccatgttgtgtactgtgcattgtgaggatgtatatttggcatgaacaggcaggcttcctctccaaactggggctgatagacagcgaggctctgggttatcccaaaccagatacaggtcaatggcttcctctttaggggtgcagggccttgattattttgtgactggcattgcaggtgttgaaacaagggtattgagaaggatgctcaacatcagtgctctttagcgggatgatgcattctgagggctgccatccccaagatgagcatacttgtgtccataaatttctgggttcacgaacaagggaagccagagacaggcatattccagataaaccacagggggaagatagcatggtcctcgtgacctgtgcacccgtctgcctttctgaagcatgcttctttatcctctgcacttcgcaggtagtgttggtgtaaaaggcaaacccgtgtcatgagggatggtcatcatcttgtgtgatccttggagatggcaggaagccctggacatacatggtgtgggggctcctccagaggctgttgggatcctcctggatgtaagtgattccatttcaaagcaccctgagtttcctcatttgcagggatggagattgtgtgtggatcgatgatgacttccatatatacattccttggaaagctgaacaaaatgagtgaaaactctataccgtcatcctcgtcaaactgaggtccagcacactgctccatcaggggctcgagagagaggaacaacatccatttgttgacacagactgcaccaaggcttggggtggggtctttttctggcagaggagagtagctgggaattttggacgtttgtaactaagagacagcttggttgaaggcagccaggtgtgtcgtcaatttgtaccttgggtcccttgtcctccagaggaagactattgcttccacatggggagacagcacaaggtcattcccagacacctctttcactcactttcatccttgtcaagggacgtaggacttcccatggtgtttggatagcatcaggggcaggcaggcagtcttcaggaggatggcgatgctgatttgctttctgcagaggagcccagagagggtatccacactgaacttgtatgtccataggaggaaacccaaaccgcatggtcccagaagggtcctggtggttagaaggggagaaagctgcacatgcatttaccacacagtcttctgtctgggttgtggagagatgactgtgagcctcttttgggtgttatagggtgcatacggtttattttatgatgatcttgggatgctgggatgggaatgtaattgcgaatccatgtgttcccgcaactccacagacttgacttggtttggcaggtttgtgttcaggccctctgtggaatgcttgtcttcattaagaatttgagatggggctgggcacggtggctcacaccttctgggtgcttgagctgcacctgtgagaaagaccccgaggtggaggctgaattgtgattgagcatgtttcttgaatgtgaagtgtgttgatggatgcttgcagtaaaaatgcttcaaggctaaaggaaaattgccctatgcacaggaagagttttttttttcccaaaactctccccattcaaatatctctatggtctctgtcttctctgatggccaagggaagggcttttgagtcggggcaccaaatgagtggtgtccagagttcttcacatttagtgctctgaagcttgctggtgccctcaaaatgtatgtgtgcctcaaaccttcatgcatgggtactcccatgcacacatcctgaaatgggtatcccatgggaagtagcgatagggtatcccacagggggttgaatggcatggcccttgtgacctatgtgtttgcctgcctttctcaagcacacccgtgttgcctctgtacttcctaggtggtgtgggcatggaaggaaggccagtggagacaatggatgatcttgttcttagcagatcactggatgtggcagggagtcctaggacatgtgtggtgtgggcttcttcaggtgctggtaagtatctattccccaaaaccccctaatgttactcctttgtgggcatgaagactgtgcatggatcgatgatgactttcatacatgcattccttggaaagctgaacaaaatgagtgaaaactctataccgtcatcctcgtcgaactgaggtccagcacattgctcttacaggggctggagtgagggccaagtttcatttgttgctgcaggttgcaccaaggggtttgttcagttgtaggaggggctccctttctgcaaggggtagtcacagggttgtgagatctctcataaataggaaattgttttagggacttctctctgcaaggtaacacacacacaccgtctgtaggactatgtgaatgtgaaggtgacatgggaagacttagcctgtagcctgcctctggtggccatatttgtccttgagtcttagctctgggttccatcattcccttgaggaaagacaggtgtttgtgcttgggaagagagcacaaagccccacctttgctgttttttccactcattttcatcattgttcaaggacattgcagttccggttttatccataaccagggaagccagagacaggcagatagcagatatgccatagggggccagatgacacggccctcatgacctgtgaatgtgtctgcttttttgaagcacactcgtatttccgctgcacttcccaggtggtgttggcatgaggaaaggaggtatcttcgagggacaatcttcttcttgtgcgatccttggagatgccatgaggcccctggacacatgtggtgtgggctcctttggaggctgttgtatcccttctgaatgtaagtgtccactttccaaagtcctgattttcctcatttttgggcatgaataatgtgcatggatcgatgatgacttccatatatacattccttggaaagctgaacaaaatgagtgaaaactctataccgtcatcctcgtcgaactgaggtccagcacactgttcatcaggggctagagagagagacaacatccatttgttgacacaggctgcatcaatgcttgggatgggatcgtctttgggtgaagtggagtagctgggcattttggacttctgtggctgagagacagcttggttgaagctcttccctctgtgtggctatgtgtgttatcgattcataccccttggctcctgcactccccagaggaagacagttactgctgcatggggacacagcacaatgttgttcccaggcacttcttcggctcacttttatcctaagtcggggacatgggagttcctgtggtgtatgggtatcatcaagggcaggcagtcgtgaggagggtggcaatactgatttgctttctgcagagaagcccagagagggtatccacgttgaattgtatgtccataggagggggaaacccaagtcccgtggcccctgaagcatcctggcagtggaaggggagagggccgtgcatgcgtgtaccacacagccttctgtctgggtcacagagcgacgactgtgagcctctttcgggcattgtagggtgcccatagtccatttcatgatgacctcagggtgctgggatgggaatgtaattgtaggtccacgtgctcctgcatctctgcagactgacttggtttggaaggtctgtgttgaggaacctctgtgggatacttttccttggtgcatttgaggtgtctgataatgagtgtgtgggtttctgtatcctggtgacttctactcagaaatgtgacccagcaaggtctctgtgcttaaataccttagtggcttgtgatgttaggttattttcaaattcctcctaattgtgtgtgacaattcacacaagtctttgtgaaattgtccttgaattgtatgacagggctagtgtctgtaggccagtgatggataagttttggactccacagccatgttcacagccaagtggcttaagatgtatggtgttcttagtcatagtgccttggaagccctgtaggattcagcatgtcttgtgctcttctgggtccccgagctgtacctttgaggaaaacccagaggtggaggttgatttgtgattgagcatgtttctcagtgggaagagtgtcaaaggagcctggggtgaaagtacttcaggaccaaaggaaaattgcccttcactcaagaagaggctttccttgaacctgtccccactgaaatatcctcatgggcttcatcttctctgatggccaaaagcaggacttttgattcagaggtggcaaatgaatggtgttgagagagtttgttatgcttggtgctctgtagctggaaggagccctcaaaattattgtgtgcatgatagcttcatgcctgcttacacccatgcacatgtcccagtaagaggggctgcctgtgggagatacatacacgatacaccacagtgggatgaattgtatggcccttgcaatgtgtgtacctgcctgctgttgtcaaacacacctgtttttcctctgaactttccaggtggcgtgggcatagaaggaaggccagtggccacgagggacaatcttggtcttgggagatcctggaaatgatagggagtcccttgatatgtgtggcatgggctccttcaggtgctagtggattccttaggatggtaagtgtccatttctcagaagctccagatattcctcctctgcagggacaaagactgtgcctggatcgatgatgacttccttatatacattccttggaaagctgaacaaaatgagtgaaaactctataccgtcatcctcgtcgaactgaggtccagcacattgctcttacaggggctagagagagagggacaaatttcatttgatgatgcccattgcaccaaggggttctgtccaggcttaggatggggtctcgtttgggcaaaggagaatggcaggggagtggaggctatgtacacaggagattccttgtttgaaggactctatttgtgaggccagggtaccacacatgctgtccgcaggagtaggtgaatgtgcagttgcccaggaagagttagcctgtagcctgcctctgcatggcagtttgtccttgggtcctggctctggatttccatgttccttggaggaggataggtgattttgcttgagaagacagcacagtaccatacttttgttgtttttctgctcatttcatcgtccattgaggacaatgaagttgtggtcagcaggcatagctttcaggccagcgtgcccatgttgtgtcccatgcattgtgagcacatgcatgtggcatgaacacataggctgccactccaagctgagtctgataggcaatgagactctggcttatcctgatcccggtgtagatcaaagtcttcccagtaggattgcatggccccgaggctattgtgagctgcattgcaggtgtggaagcaagggtgttgagagggatgctcaacattagtgctctttagcgagatgatgcactataagggcaccctgaacccagacgtgcatccctatgtacgtgcatttctgtgtccataaatagttgaagccagacagccagattccagatgtatcgcagggggctggatgacatggcccttgtcacctgtgtacctgtctgcctttctgaagcacgcttgtgtttcctctacacctcccaggtagcattggcatggaaggcaggcccatgttggtgagggacaattgttatcttgtgtgagccgcagggataccaggaaacccctggacacaaatggcaaaggcttctttggaagttgttggatcccttctgcatgtaagcagttctttcccagagcgctctgattttcctcatttgcagggacaaacactgtgcgtggatcgatgatgacttccatatatacattccttggaaagctgaacaaaatgagtgaaaactctataccgtcatcctcgtcgaactgaggtccagcacattactccatcaggggctagacagagagggccaacattcgtttgttgatatgggttgcatcaaggggtccatccaggcttaggatggggtccctttgggcaattggaagtcacagggaagtgggagctcccatgcacaggaaattccttatttgaaggacttctttctccctgggcgggataactcacctactgtctgaaggactaggtgaatggcaggtggcatggaaagagtttgtgggtagtctgcctctggtggccaagtttgttcttgagtccaagctctggattcccagaggaagacagatcccctggttgcggggagagcacaagcctacactattctcacttgttagcttgttttgtccttggcggaggacgttgtatttccaggcacccagcatagcctctttgccgcatttccatgtcatatcccatatgttatgaggatttgtgtattgcatgatcaggcaggcttctgctccaagctggggctgtcaggcaaggagtctctgggttattccaaacctgatttaggtcagtggcttcctctttcaggattcatggccccaaggcttttgtgagcaccattgcaggtgttgaagcaacgatgttgagagggatgcccaacatcagtgctctttagcaggatggtgcacctcgagggcccctggccctgggacgagcatctgcgtgtccatgcatttctgtgtccatgaacaggcgaggccatagacaggcaaatagcagatgtgtcacaggggactggataacatggccctcgtgacgtgtgcaacctgtctgcctttctgaagcacgcctgtgtttcctctgcacttcacaggtggtgttggcatgaaaggcaggcttgtatcatgaggaatgattgtcatcttgtctgattcttggagatggcaggaagcccctggaaacacatggtgtggactctttcacaggctgttgaaaccctcctgaatgtaagtgatttcattccaaagcaccctgagtttcctcatttgcagggatgaaacctgtgtgtggatcgatgatgacttccatatatacattccttggaaagctgaacaaaatgagtgaaaactctatactgtcatcctcgtcgaactgaggtccagcacattactccaacaggggctagacagagaaggccaacatccgtttgttgacatgggttatatcaaggcgtctgttcaggcttagaatgtggtctcttatgggtgatgggggtcacaggagagtggtggctcccatgtataggaaatttcttgtttgaaggactgtcagtgagggtgggtaacacatgcattgtctgcaggactaggtgaatgtccatgtggcctagcaagagttagctggtagcccgcctctggttgccaatttgttcttgagtccttgttctgggttctcaggtcccacggaggaaaacagatctgtgtggttgagaggtgggtacaaggccgcatctttgtcatttgttggctaactttgtccttggttgaggacattagagttttggtcaccaggcatagcctatgtgcctttgtgcccgtgttgtatcccacgtgttttgaggacatgtattttgcacgtaaaggtgagctcctgctccaagctggttctgataccaaaggagtccctggcttatcctaaactcatggtaggttaaagccttcctccttaggggttcagggccgcaaggcttttgtgagtggcattgcaggcgttgaagcagtgatgttgagagggatggtcaatgtcagtgctctttagcaggatggtgtactgcaggggcccccagccccgagacgagcatccctgcatccatgcatttctgcctccatgaacaggggaggccagagacaggcagatagtagataaattgcaggggactggatgacatggccctcgtgacctgtgcacctgtctgtctttctgaagcacgcctgtgttaactctgcacctcccaggtagcactggcatggagggcaggcacatgttggtgagggacaattgttaccttgtgtgagctgcggagataccaggaagcccctggacacaaatggcaaaggctccttcggaagttgttggatcccttctgaatgtaagcacttctttcccagagcactctgagtttcctcatttgcagggacaaatactgtgcgtggatcgatgatgacttccacatatacattccttggaaagctgaacaaaatgagtgaaaactctataccgtcatcctcgtcgaactgaggtccagcacattactccaacaggggctagacagagagggccaacatctgttttttgacatgggttataccaaggcatccgttcaggcttaggatggggtcttttatgggtgatgggggtcacaggagagtggtggctcccatgtataggaaatttcttgtttgaaggactgtcagtgagggtgggtaacacatgcattgtctgcaggactaggtgaatgtccatgtggcctagcaagagttagctggtagcccgcctctggttgccaatttgttcttgagtccttgttctgagttcctggaaggaaacagatttgtctggttgggaggagaatacaaggccacatctttgtcgtttgttggctaactttgtccttggttgaggacattagagttttggtcaccaggcatagcctatgtgcctgtgtgcccgtgttgtatcccatgtgtttgggggacatgtacattgcatgaactagtgagctcctgctcattgcttctgatacccaaggagtccctggcttatcctaaacccaatataggttaaagcctttctcattaggggcccagggtcccaaggcttttgtgagtatcattgtaggtattgaagcaacgatgttgagaaggatgctgaacatgctctttagtgggatgacgtactctgaaggctcctgacccccagatgagcatccttgtgtccgttaacttctgtgtttatgaacaggtgaggccagagacaggcagacagcagatgtattgcagggagctggatgacatggcccttggaacctgtgcacatgcctgcctttctgatgcacgtccatgttttctctgcacctccccggtggtgttggtataaaaagcaggcttacatcagcaagggatgattgtcgtctcatgcgatcctgggagatggcagaagtcccgggacacatggagtgtgggctctttcggaggctgttggatccctcctgaatgtaagtgattccttcttaaagcatgctgattttcctcatttgcaggggcaaggactggatcgatgatgacttccatatgtacattccttggaaagctgaacaaaatgagtgaaaactctataccgtcatcctcgtcgaactgaggtccagcatactgctcatcaggggctagagagagggacaacatccgtttgttgacaagggctgtgtcaacacttgggatggggtcgtctttgggtgaagtggagtagctgggcattttggacttctgtggctgagagacagcttagttgaagcacttccctctgcgcagctatgtgtgtccttgattcaaactccttggctcctgcactccccagaggaagacagtggcttctgcatggggacaccacacaatgttgttcctgtgcacttctttggttcactttcaccctcatttggggacgtggcagttcccatggtgtttaggtagcattgagggcaggcagtcctcaggaggatgttgatgctgatttgctttctgcagaggagccagagagggtatccatgttgaacttgtatatccataggaggaaaccagtcccatggcccctgaagggtcctggcagtgggaaggggagaggtctgcatgtgcatgtactggacagcatattccatgtgggtcatggagtgatgactgtgggcctctttcgggcattgtagcaggcccccatttcatttcatgatgacctcggggtgctgggacaggaatgtgattgcgggtccacgtgcttctgcaactcctcagactgacttggtttggaaggtctgtgttcaggaccctctgtgagatgcttgtctccattaggcatttgagcttatatcggcccagggtttctacctatcgtaggttgtgcatactttgcctctgaaccactcaggcacctcgatgcagtcaacgtgcccgattataagagtgtgacttcccatatcctggtgatctctactcggaaacatggtccaggaaggtctctgtgcttaaataccttagtagctcgtgatgttaggttattttctaattcctcctaattcttcccaggagtcttctttgtgaaatagtcatcttgttgtaggacagggctggtatccacaggcagtgatgcataggttttgcactgcgcggccatgttcaaaggcaagtgccttaaaatgtatggtgttctcagccacagtgccttagaagccatgtgggattcagtgtgtctggtggtcctctgagctgcacctgtgaggaagacgctgaggtagaggttaagttgttattgaacgtttttctcaatctgaaaagtgttcaagcagcccagggtgaaaagtcttcaagactgaaggaaaattgccttttgtactggaagagtttttccccaaaactctcctcatttaaatagccctgtggcttgtgtcttctctgatgaccaagaggagggcttttgagtcagtgatggcaaatgagtggttttgagagagttcttacacttagggctctgtagcttgatggtgccttcaaaattaacacgtgcctgctatcttcattcctgggtagacccatacacccatcccaaaaggggagtagcctgtgggaagcacatatgggatataccacagtgagtcgagtggaatggcccttttgacatgtgtacctgcctcccgttcttaagcacacccgtttttcctctgcacttcccaggtgttgtggccatggaagtaaggccagtggctacgagggacagtcttcatcttgggagatccctagagagggcagggagccccttgacatgtggaatgtgatctctgttgggtgctggtggatcccacaggttggtaaatgtccattttccaaaagcccctgatgttccttctttgcagggataaagactgtgcatggatcgatgatgacctcaatacatgcattccttggaaagctgaacaaaatgagtgaaaactctataccgtcgtcctcgtcaaactgaggtccagcacgtggctccaactggagctggagagagagagacaacttccattggttgatgtgggttgcactaagccatccatccaggcttaggatggggtccactttggatcaaagggagtcacagggcagtaggtgctcctgtgcagaggagattccttgtgtgaaggacttctctttgtgaggctgggtagcacgcacaatgtctgcaggactgggtgaatgtgcaggtggcacagaagagttagccggtaacccgcctctgtgtggccaggtttgtccttgagtgctggctctgggttcccttgttccccagaggtagatagctccttgtggttgggaagagagcccaaggccacatctttgttgttctttggctcattttttttcatggctgaggactttttagtgcccatggtgttttcgtagcagcagtggaagtcagttgtgaggaggttggtgatgcttattttctttctggagagtaccctgtagatcggctccatttatgatttgtgtgtctccagggagaaactgaaatcccatggctggtgatggatactccaggtgggaatgagaaagcgccatacatgtgttgacttggtaccctaagatggggatggtccgccacatttgcgcgtctgttttgcatggtgtgtactgcacatcacaaatgccatgttggccttagggtgctgggaatggaatatgatctgatgtctacatgggagggcctttcagcagattgcttttgtttcctgacagtctttgctccatccccagtcacacgtgtttttctccagggaacattttattggagtatatcaggtcgatatcagaaaaaaaaatgttgtggttatcccaacattaagtgtggtgatgtaacagcagtgtggatggtagctcaagtgaacagtggcaaaaccaaaatatattggtttacgtaagtgaccctattctctcctatgtttgaagtctggtatgcatctctttctgcaataatctcagtgatctggaaactttcaggaggtcttttttagatattttatgtccttgtggttgtactcatactccctgcagtgctaagtctgagtcattctgctatcctagtgctactggaatttctattgttttgggggcactgtctggtcattgtggatacctctcttggggccctttaataagaagtatgttagaggtcggttttggggcagtgttgacctcctgcctaaggtcaaaggcagttttcttcctaaatcttattgcaggattcactgcctgggggttgtgtgacagggagagcacaaaattagggtatcccatgtggacttgtgtccagtatcaaggcagtgttggataattttctatatccacaaggctcccactggactctttatgtccagcagacattcacaggccaacttttctcttacacagggggcctcattcctgccatgtgtagcttccatggaaccatccttcaggttttaagtgcaaggatttctctcaagagtttaatttgtttctttaagacaccgttttcttttctataaattctgctttctgtggtttgtagcacagatgaaattgccaggtcatattctacatttctgcccaatcttggattagtgagcctttgaaatatgttccttgatcactggcaatggttcttggaataccagaacttagttacaagcattgcagacctacagaggtttgttgttatttttaactgcatgaagcagtgggtttgtttgtatcttgtcactcacggctgtcagcaaaacttaggtgttgctaaaccagaccacacccatgaattatagtgcctctggttccttctgtagtagcctgtgggaagtagatacaggatgcaccacaagggaatgaatggcatggcccttgagacctgtgtacctgcttgcctttctcaagcacacctgttttgcctctaattcctaggtggtctggcatggaagaaggccagaggctgcgatggatcatctttgtcttgggagattcctggagatggtggggagcccctgggcacgtgcagcatatgtggcgtgggcttcttcaggtgctggtggatccctcaggatggtaaatgtccattttccaaaatcttctgatattccatctttgtaggtacaaagactgtgcatggatcgatgatgacttttatacatgcattccttggaaagctgaacaaaatgagtgaaaactctataccgtcatcttcgttgaactgaggtccagcacattgctccaacagtgggtagatagagagggaaaacttccatttgttgacgcaggttccattgaggggtttgtccaggcttaggatggggtcccctttgggcaaagggagtcacaggggagtgcggcctcctgtgcacaggagattccttgtgtgaaggatttacctctgtgagagcagggtagcacacataactatgcaggagcaggtgaatgtgcaggtggcacaggaagagttagatggcagcctgtctctgcacagcgaggtttgacttgtcctagctctgcattccctcatcccttagaggaagttggtttcttcagaagacttaaatttgtggaattcagtagaatattatccacataatgttcccagtgaatgctaggcatatcacccaagatggccaggcctctggccataaaccatagtaaatagtagggtgtgcatatatccattagggagaacctgaaaggtccttttttggccctccaaggtgaatgcctgcaaaagcaagcgaagcacgctatctgcctgcatgagccccatgtacctggcgtggcctgtgctcctcaccgtgtgtcccacttctgctgccccttcgccttgccaggtggagtctgactgattttttgccactgctgccaccacaggccacctggagccccagccagtttgaggaaagtggctctgcttgattttccttttttctttttttttcctctttttttctccatttctgacttcagcaggtgggacttggagcttctgcttctgcagccacagaagactccccagtttggagggctgtggttgtgggctccctaagcatctctctgcagagcctctttgttttccattttacccaccatgtcaataatttaacacagtggcggaggagttcatgtctcttcctatttgtcattactcttctaactttcacagctgtactcggctactggtcagaataagagaaaaagcagtggaaccaggaggatcctacaagaaatattccatttcacttttgtttgtgcatataccttttctgtttaaatgtggacttcgatttgatatgcttccagtgcagacacagatcccatatgtaagagagtatggagttgcatagaaagaagacttgtcattttcctgtactgttggtgttctaatctgtcttcgtggtttttgcctcttctggctttagaagatacaccaacatggttttgcaacatagcctcttcttattttagtaagggaccaaatgtgcatgtcagtaacaggtgttaccttgaattgggatcagtgcttgtgtgactatattcagtgatgtcattttctgtcacactcaagtcacaaaatatttaaccacttatttttttatctctggaggaataatccaaaagattgtactggtaaagccagaacaatttccaattatgctaattatttgtataatacttagttggctttatctgtggtttgttggcttattttcctgtagcttttcaaggtttttctatgagttctgttaaagagtctgaaaatggagcgtagaagacatgcttcgatttccaggatggttgtgttttccagagaggcggaggtaaaccactggcgcagccctgcctcccacagataattccgggtgcagtgtttcatatctagacttggacttctatcctaccatacttctttgtgtgcaggtatttttggggataaaatccttgttttcagctgtatagatgtcttgcacatactcttttgatggtttgatttatccattgtgttcagcacgtttcagtgagcaagatatgggatttaatttccaatataaaatccatgactgctggccgggcgcagtggcttatgcctgtaatcccagcactttgggaggccatggtgggcagatcacgaggtcaggagttcaagatcatcctggccaacatggcaaaaccccatctctactaaaaatacaaaaattacccatgcgtggtgttgtgtgcctatagtcccagttactcaggaggctgaggcaagagaatcccctgatcctgggaggtggaggttgcagtgagctaagatcatgtcactgtattccagcctgggcgatagagactctggctcaaaaaaaaaaaaaaaaagaatgttataattattttcagcctcatgtctccgtgtcacacacaggtccatgaagctgtgttctttttttttttttttttttttttttcagagtattttctttcttgtccagattagctaaattggattgttctatgctaaattcacttaatcactactctattatttttgaattttttagttctgtttttttcacttggttctttttttaaaaaaacttctactacctttctgagacttctacttttttacttttttcaagaagctttataattacttgctaaagcatttttaccatgactgtttttaacttcttcagataaccacaacatttggttaatcttgaggttggcttggttaactgtcttttctcatcctgcttatgattttccttctaattgtgatttttccggttcttgatagatgggtgatgttttagtttatcctgcatttttttttcctttttaagttagaggaatctgaatctattcaaatgttttattttagcaggcatgtgccctgtttaggtttaatttgaatgtcctgtcctacttttgtaggccatgttttcgcaggcagtcttgctatcagagctgaggggatgctgttttgatcacttagtttatctgatgttgctgggcctccaactggtgctgactggtacttcctgagatggcgaaggtttttctgtactctgagatgccgtgtatctctatgtaaggggaggagactctggaccacaggaatgaagagaacatcttaggtcaggcagctcaatcatatgcgataacctgggtcaaccagccagtagcctcatgaagtatgggagggaattctccagtgtcagcattcaaagacatcatgagtttttacttctcattttcttttaagtgaaataatcgcatggaaattaaagaataaatatatgaaatatatgaaacttatatgaaatataagaatgtgagaaggcctacagcgtggggatccccaggctatttgaacaatgaatgtctgtgttacacatctttgctcactttttctctatttttgtagttcattgtggaaccagcacagattttcatacgaaagttatttctttttaacctcaaaaagtgacagaatggagtgtatcatgaaaaagtctgacatcaaaacctcaaaatgtgatattggtaagcattttgtcctgagaataccagcatttcctcttaggggatcatgacactgcagtgaccatgtgaccctggctgtgctagtcagcctgggctgttcattgactgtgatgctggtctccatgtgattgactagtgtgggtcagtgcctccaaaggtgacagctgtgtgctcagtgtctgccacatatctcaggctcaaggtcccttttataaatgtgcctggatcgatgatgactttaaaatggatctcatcggaatctgaacaaaatgagtgaccaaatcacttctgtgccacttctgtgagctgaggtccagcacaggggccatgccagacaaacacatggagggtgttttgtttggtcagcactggtactatgaaacggcctgtggaattagacaactaaccagctcacatacagtacaggaaattactggacagttaacctaccaatatatggttgggggtaagacggagacttttcaaatgcttggctggtagcatctgtacactacagtgaccagacactgggagccagcacaggagttataggatttacaggaaattattgtgtgaacccacaagccattcagacatttgtgtgagcgcccagaatattctggttgatggtttgttgcttgatggcaaagagatgtcagcattcaaagacatcatgagtttttacttctccttttcttttaagtgaaataattgcatggaaattaaagaataaatatcttatatgaaatatatgaaacatatgaaatataagatatttatttatatcatataagatataaatatctcatatgaaatcttgtagtatattttcatttgattgccaacccagtcactaggactgaaacagttgtttattttttgttttcccatcaaccaagcaagctatttaatacatgtttcagtgctggtttcaactacatgttgcagcaaacatttttagaagtgatatttcaaattcttggattttcacatggatttcattgtctactttcatatgtcctccatgtgtgaccactgtattaattaaaagttgtaataaatgattttgaaaggtatgtgctggaggaacttcgggacaaatgttttagaaaacattatttccataaaatttggatcaaagatgtgagcataattgttcttgttatacagatggtccaatgagtgtctaatgtgaattcttataactgtttataacaaagtagtccatgaagcaaattttgtttcacaactttcctaatttcccctgtactctgtagattgggtgagatagaattccatggaatttcattgccaaaccagtgaagtgctaattttgacatttgtaccagctaacgtagctgtgaagaaacacaccaatacacttctaaggtaacattcaatttttagtgaatttatttttgtgagttatttttattcttttaagtaatcaagaatttatgttcacaaggaattggttaatactaacagtttcagacattaatgttctgatgagctgaggcatcaatctccttttgataaaggttttgttcttttctctactttgaataacatatgaaatgtccaacagcagttctaagttagtgtatattccatatatgttaatagtgaaacatcctgtcttatgcaaggctaaaaattgtccgtgtatacttctcagatttgtatacatactctcttcctacaggacagcatagaccaagatctaggtttcatatggatgaatttattcttccctttgaggcaagacaagaaggaaagaaagtattgggaataatgctgccctcccatcctcaagggccagtgggaactctaatattggtaagccttttgtcctgaaaataccagcatttcctcttagggaatcataacactctgctaaccgtgagactctggctatgctagtccgccatgggctggtcattgactgtgatcctggtctccatgattgaatagtgtgggtcagtgtgtcccagagtgacagatgtgctcagtgtctgccacatatctcagactcaaggtcccttttataaatgtgcctggatcgatgatgactataaaaaaaatggatctcatcggaatctgaacaaaatgagtgaccaaatcatttctgtgccacttctgtgagctgaggtccagcactgggaccatgccaggcaaacatgaggagggagtttacagggactagggtattggaaaactaacctacccatatatattagagcaaatgaattgttctcagttctgtaaatatccagctgtggtttgacatagcaactctctttgtatttgcttggcagcatttatagaaacagctggtagaccctggggaaccagggcatagtgagattcatgggacgttatttcacctactcttgagccattcacacatttgagctcgcagaattatctggtcaatgagcagtctcttgagggtaatgagatggtcaacatccaaatccaaagatactaatgagattttacttttttttttgagatggagtctcattctgttgcccaggctggagtgcagtggcataatctcggctcactgcaacctccacctcctgggttcaagagattctcccgccccagcatcctgagtagctgggattacaggcgcccgccaccacccctggctaatttttgtgtttgtagtagagatggagtttcaccatattggccaagctggtctcgaactcccaacctcaggtgatccagccactgcagcctctcaaagtgttgggattacaggcatgagccgccgtgcccggccttactttttattttcaattaagtgaaacaattacatggaaattgaaaaaaaaaaaaggtactctaagtagactactctagtgtattttaattttcttgccaattcagccactaggattgtgtcacttgtttttttgattttagtttttcgtatcaaaaagcaaaccactgtttatatttgagtgctggtttcaactgtatgctgcctcaaataaacttagattatattacaaattcttttttacatagatttcattggctatattcatatatcctcaaaggtttccattgtgtttgaagaggtatcctaattgtaataaatgcttttgattggggatgccagggaagctttgagactaatgtctcagattttttttaaaaaagtttatattctatagtgatcaaagatgtaagaataatttttcttgtcattcattggatagtccagtgagtgtctactgtgaattcttatattcacttgtaactaaacattccatttggcaaatttcgtttcataacttccctaatttcctctacactttgtagattgggtgagatacaattccatggaattttaccactgaaccagtggagggctaattttgtcatttgtaccagttaactaacttgggaggaaacagaacaacacactcctgaggtagtatccaatttttagtaaatttatttttattatttttcaaactgtcagtgatttggtttggtgaacaataggttaatacagacaatgttaggaattattaatctgatgcgctatctgaagcatcagtttcctttatttttaagatttttttcttctctgtagtttggataatatttaaaacatttccaagagttataaattagtatattttctatgctgattaataatgaaaccttttgtcttatacagatttttaaaaaatggacgtgtgcgtgcatgtgtatatatataaatatatatatatataaaatctcttctcacaagatgatgcagactaaaactgcattttacattttatatggctaagtttattgtttccttgtgttgtaatatgatggaaagtaatgggaataattctgcttcctgtccttagggaccagtaggaattttcccatgataagcattttgtccttaaaatactgacatcctgttaagagatcatgacactccaatgaccatgagaccctggctatgctagtcagccagggggctgaccattgacagtgatgctggtctccatgattaaatagtgtgggtcagcatgtcccagggtgacagaaagctgtgtgatcagtgtctgtcacatatctcagactcagggttcctttttaaaatgtgcctggatcgatgatgacttaaagatttatctaatttaaatctgaacaaaatgagtgaccaaaacacttctgtaccacttctgtgagctgaggtccagcacagagaccactccagtcaaacatgtgttgcctggagttgcaactagttggtcagttagaagcaaccacagggactggggtatttgaaaaccacttgagtgcatttattagaggaaacgaattttacatttgtgtataaaaattcaattgtagggtaaaatggaaactctgagagtttggttggcggcatctatataccatagaaacagagcctgggaagcagaacagtgagacccaagagaaatgttcctgcctatacttggtctgttctcacatttgcctgagctactgattgatcttttgagggtgatgagatggtcaaaatccaaggatatgatgagtttttacttctcattttctttttttttttattatactttaagttttggggtacatatgcagaacgtgcaggtttgttacattggtatacacgtgccatggtggtttgctgcacccatcaacccatcatctacattaggtatttctcctaatgctatccctcccctagcccctgaccccccaacaggccctggtgtgtgatgttccctccctgtgtccatgtgttctcattgttcacctcccacttatgagtgagaacatgtggtgtttggttttctgttcttgtgttagtttgctgaaaatgatggtttccagtttcgttcatgtccctgcaaaggacatgaactcatgcttttttatggctgcatagtattccatggtgtacatgtgccacattttctttatccagtctatcattgatggacatttgggttggttccaagtctttgctattgtgaatagtgccgtaataaacatatgtgtgcatgtgtctttatagtagcatgatttataatcctttagatatatacccagtaatgggattgctgaatcaaatggtatttccagttctagatcctagaggaattgccacactgtcttccacaacggttgaactaatttacactcccaccaacagtgtaaaagtgttcctatttctccacatcctctccagcatttgttgtttcctgactttttttaatgatcgccattctaactggcatgagatggtatctcattgtggttttgatacacatttctgtaatgaccagtgatgatgagccttttttcatgtttgttggctgcataaatgtcttcttttgttttacttctcattttcttaaagtgaaacaatttcatgtggtatcttccaagtatattttaatcagttgccaacccagctgctaagattgaactgtttcttttgttcttctcttgtttttttctattaatttagcaaacaattttatatatagtttgctatccttctccatggggcctgcatcttcagattcaactagccatggattgaaaatacttgacaaaaaattgtatggtttcatctgtactgaacatgtacagtctttttctctctttttctctttctttcttttttttttttttgagacagagtttcactctgtcacccaggctggagtgcagtggcacgatctcagctcactacaacctctgtcccccgggttcaagtgattctcctacctcagcctcctgaatagctaggattacaggcgcccaccactgtgccaggctaatttttgtgtttttagtagagatggggtttcaccatgttggccgggctggtctcgaactcctgaccttaagtgatctgcctgcatcagcctcccaaagtgctgggattacaagcatgagccaccatgcccagccaagtacagactttttctttggttattattccctaaaacagtacagtataacaactatttacgcagcatttacattgtattcagcatcatgagtaatctagaaatgatttcctgcatataggaggatgtacataggttctatgccaatagtgcacagtgctcgctgtgtttaaagaaatatcctaggtatagaataaataattttgaagtcagtgtgttgagaaaacactgacatggatagaaaatattctgtctagaatagaaaaaacaatagaatagaaaaagttctatctgtatcagtctgatcaaagatgtgagcataattattcttgtcatacatatagtctaatgaatgtctaaagtgaattcttataactgcttgtaacaaaatatttcatttggcaaatgttatttcacaactttcctaattgcccatgtactttgtagattggttttcacagaattccatggactttaactgctgaaccaatgatgcactgattttgtcacttgtaccagctaacgcatctgggaggcaacaaaacaatactctcctgaggtaacatcgaatttttagtaaattcatttttgtgtgttgtttttattatttttttaagtaattgagaatttcattaggtgtgcaaggagtcacttaatacaaatagtattaggcattcaatactctcatgagatatctgagccttcagtttcttttattttaacattttacatttttctcaactttaacatcagaaacatcctataagtgtaataaaattcttatactttacatatagttacatagtaaatcctcctgtcttatttaagtttgaaaaatgaacatgtatacttctcattcccatgtatataatctcttcccacagaatgaggtggaccaagaaactgggcttcatacggatgaatttatttttttccctgtgtggagacataaaggaaaagtatagtgaataattccgcctcccacccacaagtccccatgggaattctcacatgttaaaaagcattttgtcctgaaaataacaacaatttttcttagggaatcaggacactccaatgacagtgagactctggctatgccaggcagccatgggctggtcattgtgctgctggtctccatgattgaatagtgtgggtcattggtgacagatagctatgtgctcagtgtctgccacatatctcaggttcaaagtcccttttataaatgtgcctggatggatgacgacttaaaaatgaatctcgttggaatctgagcaaaacgagtgagcaaaccacttctgtgcagttctgtgaactgaggtcaagcacagggaccatgccaggcaaacacgtgcagagagttcagtttggtcagcaactggtaccaaaatggcctgtggtattggaaaacaaacccactcacatagcttacagcacatgaattgtacagaggtctgtatgtgtttgtatatatttatatatgtttgtgtacatatatctttggggattatatggcatttctttcagtgtttggctggcagtgtccatactctcatagtaaacagaattacacaagagtagagggaacagtaggaaatggttttgcctaccctagagtcttttatacatgtttttaggtgctataatcttgtgtgtgaggtcagtctctcaggttcattagatggacagtgtaaaaggtattatgaggttttacatattatttatctattaagtaaaagaaatatatggaaattgaagagtagcttttatctattaaagaaaagaatgtatggaaattgaagggtactttctatttgtggaaagtcttaacattttaatttccttattgatcttgtcacagaagttggaatttaagttttgcctgtcactcaaagagaagctttttagacatttgattaagggattctagtagatgctatagtaaacatttctaattgtaaaatgattaaatttgcaattcatagagttttatgtggatttcattgcctgatattcattatttttattagtgggtttcatagatgtttaaagggagatcctagttttattgtgtgatactaagggaggccttttggtcttagaaaactgactttcagtactacccatttccagggagtgagcataatttttattctcataccacatgggcaagtgaatatctatggtttatttcttataactcgtcattagtaattatgaaagtaagaaagttgacaaatgaaactcttttaattatgagggtttcatttgtcgacttcctacttcctcagtgtgctttgtgtattggaggtaatactggaattgcatggaattcctactgctgctccagtaacctgctgattttgtcacgtgtaccagattcgttgtctggcaatgagaacaatacacttcagaggtaatattgcaatttttagtaagtgcatttttcctgggttcgttctattattttattttagcaagtaagattataattggtttttcaagcagtctgttaatccaaatggtgtgaggccctaataatctggttagtcatctgaagtttctgtgttctttgtacagtatttttatacttcctctgttttcaaataacattaggataccctactagcaaaataatttagtatattttatatacttgtgcatagtaagcctgttgtatatgtacactatttgcatggttggcaaattacatttgcactttttatttttctataattttttcctattttcaaaggttaatgtggaccaaaaactagatttcatataaaagagtttattccttctacttgaggtgtgacatgaaggaaagtaatggaaataattctgccctcccattctcaagggccagggggaattcaaatattggtaagcattttgtcttgaaagcaccaacattcttcttagggggtcatgacactccaatgacaatgagaccctggctgtgcttgtcagtcatgagactggtcactggctgtgatgctggtctttgtaattgaatactgtgggttggcaagtccccaggtgacagaaagatcagtgttcagtgtctgccacatatctcaggcttaaggtcccttttataagtgtgcctggatcgatgatgacttaaaaaaatggaaaccttggaaatctgaacaaaatgagtgaccaagacacttctgtgagctgaggtccagcacagggaccataccaggcaaacccgtggagggcgttcagtttggtcaggaactggtaccaaaacgaacccacttgcatatgttagagcagatgaattgtacagaggcctatatatcttcgggaattacatgacaatgatttaagtgcatggctgacagccttcaaacacctagtaatcaggctttggggtaccagcgtcagaggagtgaacactgtagaaatggctgtgccagcactcgagtcattcacactattttcgtagacgccacaacattcttagtgagtatcagcatgtataggtatattatgtagtcaattagaaagaaattatcagtctttgcttgctatttattctttcactaaaagaaatatgtgaaaattgaagagtgggttgtattcatgggattatcttattacatgctggaatttgcttcctaactcagtctcaaggattagaacagcatttgtttttctttttcctgtcactcagggagcaattttctaagcattagatgatagattaaattagatgcttcattaaacattttaatgtgaaataatgaaatttctaattctagggattttagatggatattgttggctaataggaatattccttcattgagtctttgtatattttaagagagattctaattttagtaatactcggggcctttggccttcgagaccaaaatcttggaaacattgattttctgtacttaccctgttccaagcaacaagcagattttttagttatgtggatagtcaagtgactatggctaattaattacaaactgttgtcaggaatcattcagttgggaaggttttgtttcaaaactcctgtaatgtcccctgtgccttgcagaacggaagtgattttggaattgcatggaattctcactgccatcccaaagaaatgctgatcttgtcactcttacctgtttcattccctgggggcagaacaaaaggacgcactccaaaggtaacatccaagtttgaataaatttactttttatggcttattttgtaattttttctgtagtcaagtagataatcagttttgtgaatgatctgttaataacagtatgagacattaattatctggtgaatcatccaaggctttcattatcctttatttccaattttttttgcgttctccttttcagtaatatcaaaaacatcctagtagagttatgttagtatatttgatattaatatacataacaaacgctcccttcttgtgcatgtttgacaaatggacatatatacttaccatcttcccatatttgtactgttttcacagatcggcatgaaccaagaactgggtttcatataaaatattttattctgtcctcttgagatgtgacatgagaaaagtattgagaatacttctatcacctcatcttcaagaatccgtaggaattctcccatggtaagcattttgtcctgaaaatactggcattcctcttaggagatcgtgacactccaatgaccatgagaccctggccatgctagtcagccattggccagtcattgactgtgatgccagtctccataattgaatgaatagtgtgggtcagtgtaccccaagctgatggaaagctgtgtgctcagtgtctgtcacatatcccaggcttaaggtaccttttataaatgtacctggattgacgatgactttaaaaaaaaaaaatctcattgaaatctgaaaaaaatgagtgaccaaaccacttctgtgagctgaggtccagcacacatgataggcaaacgtggagggatgtggatggtcagtgcccacagggactggggtatttgaaagctaatctgcctgcgtatgttagaggaaatgaattggacagtcatctataaatatcgtattttttaataaaatggctattcctttggtgcttggctggtagcatccatccactggtagtaaatagaccctggaaaaccagcacatatgtagtgagaccccatgagacatgattgtgcctacctttgagccatccataagttatctgggacatgacagtcttttgagtgagagcagtttactaaggtcatttagatcatcagttccaaagatggtgtggatcttatcgattatttttttaggcagaggtaatatctggaaaattaagagtgatttctaaccatgagaatattttagtttgtttaaatttgcttgctaacccagtaccaagaattcagaccttttttctgtctgtataaagcaatattctagacatttgagtgattcaagtagatgttgtgagatgattacatttccagtccttggaatgttatgtggattttattggctaatcttcatatttcatcagtggattttcctatgcatgttaagggagatccttgttaattgatgtctaggtggactttacggttaacctgaacaggtcttggaaaaaggactttaaacattctcctgttctgtggaataagtatacttttttctggacatacaccttgtcagtgagtatgtatcataattcctcataacttcttatcaggaaacattcgatgtagaagatttctttctcaacttctctaattgcccctgtggtttgcaggttccatgtgatactagagttgcatagatttttaacctttacgccaatgaagatctgaggcaaacattgccccttttttagaagtttgcatttgtcactgataactgtaataattgatcttgttgaaaagcctgggaaatgaagatctgatatgtcacttttaccggcttcctcaactgaaaaagaatacaatgaaacacgctgaggtaacatctaatttttgatatcttttttcctgggttattactgttttaagtatttaggaatttaatgggtgctatatggagtcagttaattcagatactataagaccttaatctggtgagtcatctgaggcttctgtttgttcttttccagaatttttgtgctttctcagtcttgctgatgatctttctatgggcctgaagcgtggagagtgccagagaggctgatcctcagcagtgtggcagaggaaagttgggtgcgactaaggggtatgcggtgcccacatgccactgggtcctcagcagtaccacctggtgagcgtcactcttgagagctgagagtaggtgggaagcagctcatggtgagagggttcagaggccgcctttccctctctgcgcactgcccagttcttctagtcacatgtcccgggacagtaccatacctgtgtgtgtcctgcctgcattgctgtgaccacttttagtggaatcaggtgcagtgcagctctgcagcttctgcaaattgccacgctcccactctcaagcaggttgagtgctacgagtgatttttagaccatttgtttattcccttatcatggctttttgtgacttcttcctccccagtccgttgggtcacctttaaaggtaaagtaatcctgaggtggttgaatttacggaaatgctatgcattattgtgaatgggatgttcaccgggccaacatcttcttggaactttgagcaaactgatagtctggttgcacatttgatttgtctggcagtaaatgttggacagtatttggactgatggaagctagagacaaacacattgactattgttgaataacactggaaacatcttaggagagcagtacattagctaatttaataggtacataaactgaatcccactgtcttgtgcttgacggaccagcagacacatatgcttgtatcgttctcatgtttctacatgtttaccctattcccacaggtcaacaaagacaaggcacctagccccacatgaaactttattcctttcccttttgagatgtgacatgaaagaaaataacagaaatgatttttccatcccatcctcagggaccagtgggaatgaattttaccatcccaccctcaagggccaggtcaggtcgctaagcattttgtcactaaaatattgcccttttttagggattatgtaatactctataaggcactgtctgtgctgggcagcatggagcctgggtcattgctgtgttgggggcttggtctccatgacttaatagggtgtatcagtgtgtcccagagaagtgtactccagagtgctcattttctttcatgtttctgaagcaaacagtgcccccttttttagaagtttgcatgtgtcactgataactttaataattgatcttgttgaaaaacctgggaaaacagtgagttaaataataacttctctgaacatgaggtccagcccaattacctgccctaagcaaactatatggaaggagagttcagtttgttcagctatgtggtcccagcaaggactgtggtactggaaaactaaccagcttacatgcactagagaagtagaattggacagtgatctgtaggtacccagtttggagatgaaattgcaactctgagttcttgattggcaacataaatacgttgatagtaaacagaccctggggaatcagcacttgagttgtgaaaagcgggaaatagctatgcctacactagagccattcacacttttgctggagctgcaataatcttctaagtcatgcttgctctcgtgagggcaatgagatggtcacaatccaaggagagttggggttttcacttttcatttctctattaagtgaaaaaagtatatgaaaattgaaaaatagatattacttatgtaatcttcacagtataatttgcttgccaagcagtcactgggatttaatcagtttctttgtctttcgtttttctcataagctgagagagtaattttgtgtgcacagaagtactgtcttcagctacatgctgcattaaacattcctagatgtgaaatgattaaatttccaagtttttaaaatgtggatttttctggccacttttatatctcttcaatgggtttctaatggatttaaggagagagcctagtcatgatgaatggtgttgtgttgggtatgctgaggaaactttgagaccaatgtttcagaaaaaattatttctatactgtcatgtttcaagtaccgagtattgttcttgtcatacagatggtccagtgaacatctctggtgaattccttacaaccaacctcttgttactaaatattccattaggaatgttttgtttctcaactccctgatttcccctttatagattggaagtgatattggtggaagacaacattttgccgcttggaattctcacctccacaccaaagaagtactgtttttgtcatttgcaccagcttctttctccaggaaagatcaaaacgatgcactgcaaggttaacatccaatttttaatacatgtaattccctggattatttttgttgtgttattaaataacttagaattttttttacaaagtctgttgaaccaaacactgtaaggcattaataacctggtgagttatttgaggccttttttcctctcctagaatttttgcacaatttatattttgaataatatcagagacatcctagtagagtaatgaattagtacattttatatgcagatacatagtgaagcctcctttcttatgcatatttgacaaatggacatgtatatttctcatcttcccatatttttactccatttccacaggtcatgtagaccaaaatgtgaatgtcatatgaaagagtttaaacattgcccttgaaatatgacagaaagtatcagaaataattataccattccatgctcacaggccagtgggaattctcacagtaagcattttgtccagagaatattcttcttagggaactataacattccaatgataatggtagtcagccatgtggctggatcatcgttcctgtatcctggtctctatgacttagtgtggtgatggtgtcattgtgtccaagtgtgacagaattgttagtgtgtagtgtctgtctcctatctcaggctcacagtcccttttataaacatgcctggattgatgatggcttcagtatcttttggaaatctggactgagcaatagaattgcttctctcaaattgatttcaagtcatataaaaggccatgttacacatatattgttaatctgagggaggctgtgatcatttaagttgtattttataaacactaggaccaccagtaagaaaacaattcaaaaaatattaaaagaacaaccaaagaattaaaatagaataaccgaaaagatctgtttaacacaaaagaaggcagttaaagatgaacagaggaaccaataagacatatagaaaacagataggaaaatgacagacataaacccagccatatgacaattatattaaatttttaagagattaggaaattccgttgttttttaaacatgagcaactatacgctgtctacagaagagacactttagaacaaaagatacaaatagttggaaagtaaaaagatggaaaaagctatatccagcgaatccagaagagagcagaagtggctattctgacatcagaaaaaagagactttaagataaagtattgctagagaggaagaaggatagtatttaatgatagaagggttaatatggaatatgtaacaattacaatcatatcagcactaacaacagtgcccaaaactacatacactgaaatttaacatgattgaggggatcaataggcaattcaacaataaaagcttttgttcataccctcttcttaatcagtgataagtcaattagatagagcatcattgaggttacaacatacttcagcaatgttgtcaaccaatttgacctgagatagatagatagacagttagacagacagacagacagacagagaaaacttcacccaacaacagaaatacaaattattttcaagcatacctggaacattctccaggatagagtatatgttaggctataaaactgtactcaataaatttaagattgaaaccatgtagagtatgttgtgtgaccatagaggaattagaaatcaacacagaaataaatttggaggtcacaagatatttggaaattaacacactttacagagcccattggtcaaaaatatatatattaaactagaaaggccgggggtggttgcttacacctgtaattccagcactttgggaggcgtaggtgggcacatcacttgaggccaggagttcaagaccaacctgggcaacatggcaaaaccccatctctacaaaaaaatacaaaaaatgagttgagcatggtggtgcatgcctgtagtcccagctactcaggaggctgaggtaggggaatcacctgagcccagcaggtagaagctgcattgaaccaagattgcaccactgcataccagcctgggcgacaaagtgagaccctgtctaaaaaataaaaggaatccagaaaacatcttgcatagaatttgatacaactaaagacatgcttagagggatatttatagttttaaataactgtatcagaaaaaaagggaagataaataaatgacataagcttccaccttaagaaacaagaaaaagactaaactagaagatgaaatccaaagcaagcagaaagaagtaaacaatagggattggagcaaaaattgatgacataaaaaaccagacaaaatacagagaaaaatccatgaaaccaaaagttgggtttgtgcagagatttgtgaaatttacaatcctttagctagactgacacagatcattagaattaggaatgatggagacaacatcactactgaccctatagattggatcaggaatgtcgctgtttgctgcattgtgctttcttgaggggagagctatgaaggaaaacaaagttctcattgcacttacaactcaacaacacagcgttgacattttgattctcactggcttcagtgctcatctctgtgaggtttccagaagatcccgtagcaatatcactcattctaaatttatctttgggctactctgggaacgctgtctatgggttagccctgctctgcaaggagcagtaagaaaatatatatatattttttgaggctgagtctcgctctatcgcccagacgggagtgcagtggcacgatgttggctcactgcaacctccacctccagggttcaagcgattctcctgcctcagcctcccaagtagctgggattacaggcacgtgccaccacacaccgctaatttttgtgtttttgtagagacagggtttcaccatgtgggccaggctggtctcaaactcccaacctcaggtgatctgccctccttggcctcccaaagtgcagggattacaggcatgatccactgtgcctggcaagtatgtttgtagccagtggggaattattttaactaggcaataatttgatctattttgggaagcctcttgtaatcaaatcatatatcaacattaatcacatggtgagtcctccatggttttcattcctagagattctaggatgtttgacatttctctgcttagcttatagcagaaaggtattggatatcaagaatgtttgaacagtttctcctttttgggaatgaagatgaaattgggctagaatgagatgtgtgattgagagaatgtccctgaggcctgagcagtgtgtccttttgggtatgggcattggaagcatgtagtgaattcttataattttatgttgcctcggcatccatcttgagtataagtttaactttgttataccagaagcaaggcttactcacttttgcacagtttccagttctacacctccttctcgttcctcagtgtgattggtccagatagctgccttatccaactgcctcctttggaccacttcatcatgggacagcttgatgcaatctacttgacaagaccctggaaccccacacccctcatggaaccagtgtccacctcccagtcacagtgtgaccccagggaactcttgcctgcttgctttaaacccaccacttaaaagtctccacagaaaacctgtttgaatagtacccttgacccaataagggcattggcccctgggtgtctctctctctctctctctctctctctccctctctctccctctctctctctcgctccctgacctctgcgtgtggactccaggcatgccatatacccctcaggacctgtaagtaatactatctttatttttattttatatctctcctaatcattgaaaaggtgctctctatcttgaagatactatattaaataaaatgagaacttgtccctaacacagttagtgataggctgaaacacgctgattgcactctttacccatttagtgatttttctcaagttactctacaccatgtattatcaacataattgatattacagaatagaattataagacacttcttttgccacagaaagttctattggactcagattatctagagctactacatgtatgctattctatgataaaagatgtagatgtgataaaaacatttataaaatatctgtcttagaaaagttagctaaaattattttgggaaaagtatgtttgaaaatagaatcgtaagctaccacattgtgataaatatttctaaatgtgtctattaacttgtcaggagacaacagagtgaattaaaacagtagccttgtatcagtatgtttttattcagaagacaaatgcacgttttaactattatatgttcttggcttaactttttttgtaaagttaagacattacacttttacatgaatctgtaatttcaagatatcttaatggttgacagggacaggacaattgaagaaaacctgtaaatacatttggtaaaatttatgatggattgttttgcagatggcttcagaggttattagcacatctgtttgagatatgcacagttttacatttgtcccttaggtaatcaacagggctgagatcagtaaatcacatgtaagccactgttatgaggctattctgaatagagttacatcattttatcatatctagactttctagttatattggtgctgttgaaaatgattttgtattacatgctttcttccaaatcatagatcaagatattttatttatgtatgtcttttaaatgaagagtggttaggatagtcctgattattgcacataaatattgcctttcactagattattgttttgggccaaattttagactattattttaaaaaagagtaccttagtttaatccaacctttccagatacttagaaattattgaaatgtatattttgtgaagatggtcttatgaaagttgttgagctagaaacatgtccttcaccagtggaattcttagaagctttccttgggcttcactgggtgctaatagaccatgatcgtattgctctgtatataatggtacaaattttgttttataacactcagtcttaatagaatgggaatattttatcttactaacgtagtcattagctggccactctctgtgtccattggaccttatagggtaaagggagggcagtgcgtatttgaagcctgtgcacgtgacacacaaagggcttagcaacctccgtgttttcccagcacaggatacccattcttcctgaatgtttcattgttaaattagattgtgtgtgtgtgtgtgtgtgtgtgtgtgtattttatattaacatacagatgtatgtattttagttgcattttttttcttaaaatgttattttttctctttttcttttatgtcaggtgatgatagagcccctagggaagcaaaactgtccatgcccttgccttaactttcagatacgataaaaacaacatttataaaatacctgtcttagaaatattagctaaaattatgttggggaaagtatgtttgaaaatagaattgtaagctaccacattgtgataaatattactaaatttgtttattgacttgtcaggaagcaaaagaatgaattaaagaaaactccagagaatgagctgacaacctactccctggtcagtggctctccatgcctacctgtggtctcttggacacccttgcaggtatgtgggcagggaactgcatgtttataggaaacaggcctaggatggaaggagttaatagatcttgctcttcttgagtttgatgacatttgtttccagttaaatagcatgaaaacccatctgagagccagctgagggtggatacagttctggggagttaaagacgagtggtcacaacaggtcttcctcggcaatccgagcccaaaactgaatctgcctccataagaccattatgtgtcagctctttatttatatgattgattcatccagtggacttttaatttcttatgtccagatattttttcagttctttttttcgtgatacaagcaccttgtggattgcctgtcatagaacaggttctcaataaacttttattgaaaaaagatgtataagtagattgtcttgagtaattttgtgaataacctgaccaactaagcagtagaagacaaatgattttaaaacagaaagagacataactttcagtgggattcaggtgatctagtcgggtctggaaatgcgcaagagagaaggtccctgatgcagtgtgctgacattgaaatgtgtagttgtggactagatggttatggtttcagaactgtgtaagtaaggggtagattccaaattaaatcaatattaaagagtagcagagaaggaatttccagattccagctgcattgcttgtttcattggaagtggtgtttctcttttttcttttttttctttcttttttttttttttttttaaacctcagaagatgacttcctgggaactcttctgggagtgaatgttatcagcaaattcccaaaacaacaccccttagacaaaaagcctcctcacctatgcattgcctagaccacccactaaaggtaagatgttagttaaaatagtccttgctttctgggagaagccatgtcttagtagaaattgagctgttaattttccgaatattgatgatgtttgattacattctaattgattctaagatttcataatatgttaagagatgcagcttttcttatataccttcgtggcttttctacatctcagtacatttactgttaatatgaaggatttccataacttctctcatctagtaaactgaactccttcatggcttgatccattgtgatgctagaaaattgttgtacacagaagacacagtagcctctccataactgttagactggaagtttgacaaactggtctgaaataactgatcaaatcaatgaatgacctagagctttaagaaaccagatgggaagagacagacatgaaacccaaggttgttgatggctattacttttgagcccagcaaaaggagaaaaagcagcaccaatatctggcatcctggacatgaggaagttttaatgtcattgttttggcctcatcatggacccaggtgctagaaatgagattttctctgtgtactctgggtatatttgttctagcacaagtagggggaagattaaagaggaatttcatacccccatgactccttaggaaatgtgtttctcacctttgccacttttccccactgtgtccttgcaggtgatggccacaaagaggtggatttgttgagttggtgccattccttctactgccagcttcaccaaaacaatgacacagtcttccttccgcatggagactcttctctttcctgtgttgcagtggatgcctcctgcagataagaaatgcttaactgagaaatgctcatgttgggatatcatcgatgagactttaatttgggcatggtgactgtttcccttgctgccacttgactcaatcccaggagcctcagtagaggatataatattacacaagatgctcaaaatggtggaattgctcagtgctcccataaatatacatttataattttcatttgccacatggtaaactgaaaaatacagactatattaaaaagaaactgcatgattttttttcaaaaattcaaagcatatttaaataatatataaattaaatgccctcctctcttccaattctgtccctatagttttcctctattaagtgaactacatgcattcttttagtggatagatgcacacaaacacacaagccattatggggaaggatccacgtgtgtggccatattgtaacacatttttctgcaaatcacctctttcatttaacagcccttattcaatggcctttttctttttcagtagtacatacacatctgtgtcatttgttgaatgacgacatgaatgttttgtagataaaatataattaaatgttttaagcatttctcactcatagatatttatgttagcaccaaatttctgtgcaatgaacctccctatatatcagtaattttgcatttgtctataatatcataataaattacttatcagttgaattactgggattaagtatgtgcacactttatatttatattttgaaaattattgcaagattgccttcaaaaatgtggttaacaactttatcttcaaatggcaatgaatgagattgccagctttcctacagcctcacagacaatggattttataaatatttaacatttttgccaatgtgatcacccaaactattgtcttaaattgtatctcttttgtttttgagtttggtcattttttcatgtttattagccatctgtattttttaatttcttctttatgtccaattttgtgggtgggaggaggatttagtctcttcctgatttcgaagagctcatttactatttcgggaaataagatttggattgtcaaccattatagctattttttacacacttttcaactttgtttttgttataagaatgtgtatgattgttacatgtccaagtataaccatgttcgcttttatggcttctgagtttcatgtcatttttggaaagatatatatattgagtccataaaacccttcacctatgttaaattctaattcttttgtgtttttttaattcaaattcttaaatcatgagaaatttttttgttttgaaatcttaaagttgccaagttacttgccattacttgcgattatttgccaataattgcccatttatctgtaccgccatcttgcgcatatgctgtactctcatctgtgactggctccatttttgttctgtggatttgtgtgtctcttcttctgcctcctgtctcgtgtctgctcgttggaagaaattacagtttagactgcaatttcatcaactttaataaatcaattgaggggagaattggtttttaaaaatattaagtaagtcttcgtatccaaggacaaggtatgtcttttcttattcaataattttaattactgttaatattttcactgtggtgatgggagtttttcttttaatttattttcttgttcattttttgtatctaaagtttttgttttgttttgttttgggggtaagttgtcaccttactgtttcttgttgcttttcagattttttcaaagtatagactaaatccttcacaaatatttaaagtttttattttcccccttcatattgatcctgattttagttatgttgacaaagtccacagactgttactatcagaacacttgaacagttatggaaatattacctacccttgatttaatcagagtttaatggtatgcttctttggtttgactggcacattgtcgctggtcatttcctcccaaagaccaccagaaagagctatgatcaagcaaagctgagtttgttaaacttacctgcagcaagggaaaacaccaccttgatagggtttaataatgtttcaaaatcaagaaatgaggctttggggtctgggcagggaactaattagaaatgggcaaaatttgtcatgcaataccttgtgggaaagtgagatgaggttcttaatgtgagtattgatggtgaaatcattttctaggtgagctgtttgcctatataaagatgttatcaatgacagaagaactatttgcctagataaacaaactgaatttatttattggtttacagttttatcttgctgggcaggactctgctgggggtggtatcaggtcttattcccaataggtaagttatttggatatgggtggtcttaatcatcaatgtgtaaaatgctgattttaagtgcgaaatactttgtctaccatgttaggaaagtctgccaccttttatcttttttaaggaattttaatcaaaaccaggtggtagatataatcaaattgttttgcagaatcaattttcctgttctctttaaagacttttatcactgtgaattaatttactattattgcaacttcctttaattccttgaatgaacagaccctactggttttaaaaatgttttattcttttaatttactacttaattgtgggtattttaatttgatttggaatttttacaagtatacaactaagtgaaattgatctgtgatttttcttttttgtgctatttttgtcatgttttgatatcagatattctggttgtgttaaaataattttgaggattttcttcttatactgtgttctagagtgggtaaaaaagccctagtctcactatcagtgtttaagtgaacacatcagtgacatcatctggactctcctttgtttttgctggtttggagttaggacatctagaagtttttttctttttttcctttttttgtatggttattgcttgttctttgttttgtgtcaaatttaacctgttttctcttagcaaatcacagctcatgcagattttcaaacacattagccttgttatacaaagtgttctttcatcattctattaaatttccattttcattccagttatagttatttctgctgtgcctttgttaatgaataagtttaaacagtggatgtttagcatcactagccttccccttccatctcccttaatcaggaccttggtataatttatcaggtattttttaaggttctaatttacttatatatattgtttctgtattcttttgtttcttttcttaataaattcttaaacctgtgtaacacattcatattcacttgttcttggcaatgaaagatttaccctgctgtgcattttataaaacttgtcattatgaacacattgtaaacatacagtgtatgaagagaagaaaacagtgaactagcacatacaaggaactggaactggttccatcattatcagtattttgccatatttactttgtgtttattttaagtattttcaaataagctagagaaatcttaacgcttcttattctcccataaacatttttacaattttatttttgaatgtgtatgtatacacattcgtatgcttttatattgttctataactttcttttatatcatgtaatatataaatattttaatatttctatctgattattacatatccatagatgtgaagcttccctatttttaataacttatatttttacataagtaaaatttacatagttaaatgcattgatatatagtaattgtataattcaataagtttcttaaaagtaattactatcccattcaggagatagaatatttttattacttgagaacctaccctattgcctctttccaaccaagcaccttctcaaaaaaacaatgttgtgatttttatgatcatagataagttttgcctgtttggaaattaatataaatggaatcacacagtgtgtgtctggcttcttgcactcatcataatcatgttgagatttatctgtgctattccctatatcagcagtttaaaaaagtttctatagttgtaatatttcactaaatggttatattgcagtttatctattctcttgttgacggacacctgagtagtttctagtttttagctgttttgaatgttagcagatctcttatgtaaatacctaaaaattgaattgtttgatcataagacagattttgcttaacttataggaaactgctagagagtcttctaaagagatggacacttttcgcactcccaaccagtgatatgagatttttagttgctgtccatttttgccaacattggaaattgtcagtcttatctattaagtgggtgtgaggtgatattttgttgtgacttcaatttgaaatttgaccacttaagaaggcaaccagtttttcatgaagttatccaattgtaaatcttctttagtaaaatttgtatatttttcccaacttttaaattacaattttgaagtaattttggacttacgggaaatttgcaaaaatagtagagttcctgtgtattctgtacccagctttctggatgttagcattttatataatcattattataacattattacatacaatgataattgaaatcaggaaattaatataatactgtcaaccaatctgcagactatattcaggtttttcaagttatgctactaatgtcctttttatctagtccaggatccaattcaagatctcttattttatctggcatgtttcctttgccctctctcctgactacaaatctgggagagctccctcagtctttctttgtatttcatttaattgacacatttgagaaatactagaccataatttggtacactagtcctcaatttggatttgtccgatatttttattattagattaaggttatgcacttttgacaaaagataacacagtagtaacagtgtgcccttttcagtggatcatctggagtacatgaagttaatgtcttatttctgctgatactaaatatgacgcctttattaaggtagtgtctgccaggtttatccactgcaaagttactgttttcctttctttgtaattaatattttatgagaaaataatttgagactatgcaaatattttatttcatctaatttcagtattaattgaagattcttgcctgcagcaattatgattatggtgtttacctagtaatggtttctatttccatgatactttctctacttactagaatttgactgtaaggaagatctgtccttcttccccatttatttgtactcagttgttattttacatcagtatggatttgtggatatcttattttatggattgttatatattgcaatcattgtttgtgtttgattttcaattttttttctggatttgatcattgggagctccttaaagttggcccctgtgttcttttaatacaacctcataattttttgaccacttcttattttcgggtatcacaagatattctaggtttatcttgtattttccttccccacgcctgtaatcaaccatttcctcaaggggttctagttcttcatattggaaaatagtatttagaaaccaagatcttggtattaagtgtattaattgctaatggggttttattgcttctaggcctagagctgggagctgtgtgtccgtttacacacatacacatacacacacacccctatattgtctctattcatttatctatcttaaatatatatactaatagtatgtagaatactatagatagtatatatctatctttattaaaaatcacaagttcatactgttgtggatcataatccatcatcatatggttcattttattcttccctcttggcttatttgtgatttgcttcttcaacagtgagaaacctacctttcattatctacaatatgttttgttatttcttcagtgcagtatacacttaaataatttcagaattgctaaattatacccctttaaaaatgaaatcactaactacagcacagtatttaaatatagttcttttgtctttatccttaacagcgttcagtcaacatactattatttctaaacgtatttaggttagttatcttttttttcctatcccctgccatatggttacattaatcatataatcaagcaggtttttttattgtttatattccattttgagttccctcaccttttggattattttaactatattttgtatatgtgaaatattactatgtttctaaaaattaggactgtgagaaataccactctcccatcatccctgctacactgattctattcctcccttctttccaccctaatctcacccaacccttagagttaactagtctaatagtttctggtttatttttttctcttgttattcttgttcacaagtgggcagatacatgtatattttatcatatatcacatgtatattttatatccccttccttcttacatgattagtggcatactatagatttttttttgttgcagttttctttttccgcttaatatgtcctggaaatcacttcatgtgtattcaaagagatattcctcattctgtcatgcttagtgcttaactccatggatgcaccacaatttattcaacccctctgctctatgagaattgtttgcaatatgtgtaaagtatcacactacaaatagttttacattggattgtttatttgctcttcgtttggaagtgttctttgtattactgggacatacatttcttgttcaatatatgtgttgcaaaggtttctttcattaagtatcttagcctgcctgccttcctttccatttcctttctttttcttttctttcttctccttttaatgctgttatgctctaaattttaaaatggcccgaatttgccagtggctcatcccttattgctatttattcttcctctccttttctcccccatctcttttcctttaatttacgtgaaattaacataacgtagccatttagtgcattcaaaatgttttgcaactgccatccttaactagttccaaaacattttcagcaccccaaagacaacccatacccattaagcagtcagtcccaactctctttccccatcttttcatttttgttttttggagtttttttgagacaaagtctcactttgcacccaggctggagtgcaatggcacaatcatagctcactgcagcctcaaattcctgggcttatgcaatacttccaccttagcctcccgagcagctaggactacaggcatatgtcaccacaccaggctaatttataaaaaaaattttttagacacagagtcttgcagtgttgcccaggcttcttgtgtctttcgataaacagacattgaaaatttttaagtccagtatatcagtttgagtctcttatttttagtgcttattacttactattaaatctttgcttactccaggtttgcaaataatagttttctaagttttcttctagaagctttgggacataagtataacatctatctcaaatcattttcaaatgtagttgaagttacttgttttcatcaatctccagttgttgcagaaccatttgatcaaaagatttttctttttctactgaattatctaatgccattgttgaaaataagttggccatttacgtatggatcttttttgaactctctgtttttccttctttatgccattctttttcactgaagtttaatagtaaatcttgagattaagtagtgtgagtccaaaattttgttatttcaaggctttatagaggaaggagatggctacactgggtcctttgtatgttcacttaaattttaaaattatcttgtcaatttcctaaaaagcccaaccgagaaattgattttgattacatcaaaactatagataaatttaggggggattgacatcttaacaatgttgagtctgtagttctccatttattaggtcgtctataatttctcatagatgtcttttatggtgtttagtatagaagcataccttgtagttttcaatatagaaacattattaaaatttaacatttaataaactagattaaattgttaaatttatttgttttgttgttttgatgctattgtaaatgaatatgtttaaatttcgttttccagatttgttactattatatgaaaacagtaatattttcacattgcaactgcttttcagttgggttgtcttcttttcagtcttaggagaaaatatgtaatttcttaccattaagaaagatactagctgttatttttttgtagatgcccattaccaaattgagcaagttttattctagtgccagtttgctgttaatttttataataataatgtgataaatttgctgaatgtttttctacatttattaatataatcatgttttcccccttattctcttattatgggagactgcattggtcagcttttgaatgttagcccaacattgcattcttgatgtaatccaattggtcactgttatccttcttgtatatatattactgtattcaatttttctgctagttatttaagagttattcacctatgtccgtgatggccattatcctgtggtttcctttttaaaaattatttttgtcagatgttggcattaggcttcataaaatgtatttagtatagtgctctatttgctagtacacttgacccttgaacaacagacatggagattaggggttcagactcccccatagttgacaatctgtggacaattgtttgctctccagaaacttaactacgaatagcctactgttgactgaaagccttacagataacataactagtcaattaacacatattttatgttatatgtattacatactattttattaacaataaagtgaatgagagataaaatgttattacgagacataaggaagagaaaatatatttactattcgttacgtgaaagtagatgatcataaaggtcttcattctcatttttatgttgaataggctgaggaggaggaagaagaggaggggttgttcttactgtatcggggtggcagaagcagtacacttggtgtaactgtatggaaatatagtttctagcttttttgatttttcatttctctaaaaatgtttctatatggtacagtccttcttccactgtttacttatttgtagtacccacatcatagaaggagccatattgtaaagaagtcaaatgcagacttaaataattagaaaccttctgccagcgtgtttttctggcactccttctgtgtcgtcttccttatcgtctggtactggttcagaagcacttgtctccatcacgtcatcttctgttaattcctctagtgtgttatctattagctcttgaatttctccaaggtgtatatcttgaaagccttcactcaccacccttttttccgtgttcacgatctctttcgtgatttccttggttggctgtattgtaaatcctgtcaagtcatgcacaacatctggacacagtttcctccagcaggggagtgtgttgtgttgggcttgatgctttcacagctttttgtgtaacgatggcatcttcagtgctgtgatccttccagactttcatgatgttctatcagggttctcttgcatagtgttagataatcctttccataaagtactgtgtgtaatgagccttaatggtccttatgactccctgatctagaggatgatttagagatgttatgtctgggggcaaatagaccactttgacaccttcagtattgaactcatggggtcagggacattgtccaatcaaaaaaaaaaactttaaaaggcactcacttactgcaaggtacttcttgacatcagggtcaaaacatcaatgaaaccaatacagaaaaaaagacttcttattgtccaggcctttttgttttacaatcaaaagaccggcagctggtgttttaacttttcccttcgaggctcaggagttagctgctttatagataaggtcagtcctgatcataaacccaattacatttgcacaaaacagtagaattagcccatcccttcctgccttaaatcctggtgctcacttctcttccttactaataaatgtcctttctggcattttttttttttcagagtagggcactttcgtcagtttaaaaacctgttcaggcagatatcctttctcctcaatgattttcttaatggcatctgggaactgcttctcctgcttgactgtttttaagccagacttctttctaaaattatcaaaccatcctttgctggcattaaattctccagatttagaaccttcaccttccttttgcttaggatcatcttgcaccctagaggtatgccttacagcaatcctgtacccgcagaaaagatgcattttcaatagatagatactttgcaaaagtgcaaggttttcacagtgttggtacagctgcaacaatggcttcatgaatttccttttttttttttttttttttaacaattgtcctcacactggatttacttatcttgaaatggcaagtagcccctgctggagacctcaatctgtggtaccttttaagcaattaaacgttttcttgtaatgtcatgactttcctctgcttcttaggagtacttccagtatcaccagtggcacttcatatgggtcccatggtgttaaggtttatggtattacacaagacactatgaaaagtaatatgagaactgtgaaagcttttgttttgctgccacatgcaatttactggagggagaaactgtttcctggcatgatttcgggtcacctggcactttaagcagatgcaattgagctccccactgtagcaaaaggaggtggctacaaaattattacaataatgctgggtgtactacagctaattttatgcagttaggatttaataccacatatttacatttctctcaactgcaaatggcaccatgtaggatctgtgagtatgtgtgagtaggttttgataaattttaactttttataatttgtgtatattttatggtaataaatgataaaaataggctagtatctacatctattttatgcattcatgacatacctttttcttaatttttttggtatttctggactacgcagttgagttttttcaaattgtcacaaatttccaaaaatgtatccaatgtatttattgaaaaaagtctgcatataaatagatcatatgcagttcaaacttgtgctgttcaaaggtcaaatttctttgtggaatgtttgatagaattcattagtgaaatgatctgggcctggagtttccttcgtgatattttaatgaacaatttcagtttatttaataatacaggattgagagtttctgtttcatttaatggcagctttagtactgtttttcaaagagtatagtccattttatcagatttgtcaaattcagtagtataaagttgctcatgatagttccttattacccttatactgtctgtaagatctcacctttccaattctgatataggtaatattattttttctcaggttggtctttttttttttttttttttttaactatcttgtcatttaaaagaatcaatctttgatttgctaattttctctttatctgttttttatattattgatttctttccttcatcttaccttggttttaatatgctcttttttttggtagcttcttaatcttgagactattaagtcttctattatgtaccttacttattttctaatataaccattgaaggctataagcactacattgatagattccacaaactttgatatattgttttaattaccatttaattcaattattttcttcctttgtgttttaatttgatctgttatttttaagtggagtatttaatttccaaatatttggggcttttctgtgtagtttgttacaacttctgttttagttttgttttggttctaaaaagttactctgatatttcagctttccaaatttattgagacttatggtctagcatatgatctgtcttgacaaaagtttcacatgcacaggaatatatatttaaactcaaggtgtgcagattttgttcagatagatagtgtctagattttctagattgtcagtgaatttttacaattgttttataagttacaaagagaatagtgtaaaaaatttctgctgtgattatgattttctttatctttagttctctcagttcttcgtgtatttggaaatatcttattgtttatacttttatgaacatcatgactgtaataaattttatcttttcctaatttggcctgtcttaccttatgtaatatttctggtcttgatgtctgcttcgtctgatatctgaataatattaccagttttcttgggtttgcagtatgtctggtgtatctttttctgttctttaaatctgtcttcatagtgcttccattatagagagcatagagatggatcttttttgtccaatttaaccatcagtgacttttaagtctttggggtcttaagtccctttgcattaaacatactaacgtgactagacttatgcctactatttagctattgtttttccatttgtcccctctagtttgttcctctctgcctgctttgcttcgttcttttgggttaattgaatatttttagtatcctacattaacttctctgtttacatttcggctccacctctgggtattttgtatgggttataaaatgtacccttaatttatgacaatctgcttagagttagtattgtacacttctcatgaagtaaaattttatatatatatatatatatatatatatatatatatatatatatatatatatatatgagggagtctcaatctgtcacccagactggagtgcgggggcatgatctcagctcactgcaacattaggtggaactgtattaactctaaaaggactgtgataatttaaagatgtatattataaccatagaataatcactaaaaagtacagagaaatatagctaaaaaagcaacagcagaattaaaatgtaatagtaaaaatacttgattaaaagaatacaggaaagaatgaagaaaagaacaaagtaaactgtatagaaaacagatggcaaaatggtagacctaaacacagtcatattataaattactttaacggtacacttgtttttcattgctttaattgatcaaatgataggtaaagtattttaaagtctctttgtagttttctttaaatcttaacattttgtgcaatgtttgctttgtgaagattgatgctatgatatttaccaatcatttagaagagatattgctgggtgttttggtaagtttaggttacttacatatcttatatgatgaaatcaacattttttatttgatcaacttaatagaggcatcctgtttgaaagaagaaaataacagatctacaaaattctgattcatgtaataagtaaccattatgataataaatgtttttatttattgagtgcatactgaaaagtggtaggaagattttgtgctgaaatatttgtaaacctagtaattaaaaaatgttttggctgggcttgttggctcacgcctgtaatcccagctctttgggaggccgaggggggtggatcacttgaggtcaggagttcgagttcgagaccagcctggccaatatggtgaaaccctgtctctactaaaaatataaaaattagccaggcatggtggtgcacgcctgtagtcccagctactcgggaggctgagatgggagagtcgcttgaacccaggaagcagaggttgccgtgagtcaagattacaccattgcactccagcctgggtgtcgcagtgagactctgcctcaaaaaaaaaaaaaaaaaaaaagctgctaattaccccatgctaaatgtgttgtaatggtattaatttgatatataacatatatgtaacattttatatatgtgctcatatgatgatactgataatacctccctcaaattgctcttttgagtattaagaaaagtttatatagaaaaaccagtttggaaaggtttggaacataaggctacagtgattagatgttgagaacagcagcaataatagttgtcattataatatctgattaaggcaatatttgcacccaggtataccttgcttcagaactgtgtgattaaccattataccttgaggctattcataccctaccttcactttgttggcataatctgaagttttaaaccataatcacatattgcatttgcacaattaaattttaaaatatatacaaattacagtcaaattattgcattcatttcatgactatattctgtttccatccataagtaccgtatggtcaacaataacatgtcaaagagaattttgttgtcacctcgtttcattgtaccatgttcacactgttctttatctcttttttccattggcagtattgtgttctcaagaagaattattccagaagcacccctgaaataatatatttccttaattttggtattattagcccttctttgcttttctctataaattgtcctgatcagtcacctctctcaattatatacaacacaaagtagcttaaaggagaaaaaaaaggagataaataaccatgttgggtctggcgtcaggcttaatggagtccagtagtccagaatttaaagacacatatgaccgtttgctcccttatctcttagttctccatttcttggtttggcttaaatcttcagtcactttttctttatgtgaatttgcaaagggatcatttgaagccctagatgcaattattacctgccttgcaatcttggtaggatgtgtcctccttccctcctccttgtccatgtaaaagttggtgggtgaagagatggacaaggcttgagtcactaagacattcactgacctgggaataactcaggataggtctggtcatatccccaatggaggcaatgtaccctaatgaaaaggtcagggtcactggtctcattgtccaaggtgttatctgagctcatggtctcacaaccaagaaaattaaggagtatggacacagggtgaggttggttggagcaaaagtttagtaagcgaaagaagaaagctctctgcagcagagaggggagtccaagtggattgccgtttttacagtcattcaaaagcttttttaagaaactcctctcatctctgtagcactttgagtaacttctcttatcagcaaagctgtctgtacaactccccttatcttatgcagctgtgggtatgtctctaggcaagcacaaagcgccgcttatttttgtttgtgtaactgagggtttgttttaggtaagccccctcctttctgtgcaggcttccagggagcccaccatgtacatatctgaaaagggaaggaaactttttgctgggagcttgttaatcatacaaagaataaagggcttccatgccagactttgcctgcctgcttatctatggcttatctgtgcagctatagcctgagtttcccctggctgctctgtttttgcctgtagctgtgattttttcaggcagacagcttctctgaggactagtctcttagctgtttactcaagtaatttttcctgtccttttccctcactatgattaccagctcccctaggacttcatggtctggaatgaaatattccgtgggagtcagggaaagggagtttgttgcaaacatgtccaggccagacactttatataaagtgtcaaagtaaagtacacttacataaagtgtaagtgctgccaccaccactagggtgccaggtactctaacacaagtctttattcccatagatgtgagttaacatttataccaccagctcacactatcaaacaatcccacgtaccccaaataaacactggtgcctggtgggcagcaacaagccctccttcaaggaaggagttcatttgttggtttatccagctgctcccgctttgcttatggaagcgctccgttttctaggggtcttagaagctgtagcagtggtagaaagccccttttttgtggactattatgacttaggcttttatcagagcctcagagaattgctgttgttttgttggttaggctttaggtttccaatctgcatacacaattcctttgaagcaccaggcttccaggcaatttggttgagggaacttattgggatatgaaatattatcaggcaccatttctaatcaatgtacctaagttatgacttcaggtttagagaaaaaaaaaatttttttcccttggcttcaggcttccttctggaggtgataacctcctaaatggactgtctttaagggcctgtggcatgtgccctcctttcaggaaactagtgtatgcctggaggcattggtaatggcttctctcatcttactgtggcttgggaagaatatggctattgcagattttctagtttcattaccacctgaccttcaggctccttacatgttataggcagaaaaggtgcctccacaaagttgtgggctattctctgctttcagaaggacagctggaaatggtacttaattctttgtagcagcaccatcatgaatagctgcccacacccatatacatcattatcttttttggtgaagactctaagacttcaggccatgatatccacaaggctatgttcatgcactacttcggtataatctcaaaataattgccagctccccagtggaacgcctgccttggtccatgtggaatgtgggcatatggtaggatttccttggaggaactagaagaggaacataaagaatgttaggcatataaattattgtttctttttcttcttgtttctttccactgagttatgtgtgagcccccacacccaccctaccttcctgtcctctaccttactgatgctattttcaggctgttgtagaattgggtgtgtaaaattaaattagcctttctcctcttaatatctgtaaaatgaacaaatttgacaaagaaactacctatctgatatataagaaggttattagcctgtaccacaagtgaaaaagtttcatcctgatatatcaaaatagtaccacttgaaggaaaacgttggggccatctgtttctctcattgtagttagagtacagatttttaaaatatgagcctcaggcataaaaatgcagtattagcaactcaacttgaagaagcagttactagtgtcctgggtgggccccagggaaaatagtaccaactgcctgttatatttaactgcaattaaaaatggcagtgctgggtatcttctgtctctgggtcatctcctaaagatcctgcagagggagccatagctagtgtagaggccagccataactagccatggcaaagaccacagggaacgctcttcaacatgctctgcactgatcctctaccctggtgtggagaaatgtcagattcatcactaacaaggttaaaggtgtaaattgagggaaaaaaatgagaaaagttatctttcacataagacttcagaaagaaattgcgtcgtcaggtttggaactggtttgtaatttcatccagttattttcattttaattactgtcactgttttcttcatccttgataaactatgagctctttgagattgtctttttcatatcctgatgtcagagcttcctgtattttctgatcatggtatgtgctaagtaaatgcaatttttagcattttgaatggtttatcaaatgattgaaggagtgggtaataatatagattacatatacagtcagccacatatgtgtatgtatgtgtatttgtgtgtgtgtgtgtatatgtatatactgttgaccctccgtatcaatgggtttcacatttgtggattcatccaatcatggatcaaaaatattctttaaaaatatggttgcatctgtactgaacaggcacaaactttttttcttatcattattccctaaacaatgcagtatgacaactatttatcatagcattgacactgcattagatatgataagtaatctagagattaaagtatataggaggatgcatgtggatcatatgcaaataatacactacatcttatataagggacttgaacatccatggagtttggtatgtggtgggtgatacctcctctttgaggaggtgagtatcagagacgcaggtaaatatgatccagagggcaaagaggcattgccagcctcacactggctgtcaacaccatgctgagttccacgaaagcagcgaggagagggtggtgttcttgtttctggtacaatacctggcatagagaagatgtcacagcaatgttcgtctattgaataagtcaccaaaattgtgaatgactgaataaatgggcaaagggatttgttccctacttgctgtgggaagtttcttgtagttatgacctccatgaaagagagactcgtatctggagaaagttcatagctgaaaccatgagatttaacttttgaagttataatggatctatttttttaacatcataaatgaagattatgcaatactgtatgtgcttcaattgacacaaccccttcccattcagggctgatttatgttctgtactgaatgacaggcacagaagtaaatgtgataatcctgtcccgtcgttaccctttattgtggtcttgctgtgtcccagccacacacttcatactgtatctgtgtcatcattctcatatacatctatataggtacacttccatagacttaggcccatttaatggaggagcaactccaacatttagagatcatgaaaggtacctcatgacatatattgacctagtggcagagctgcttagttctacagcctctgagtggaatcctcacgacagtaaaaacacaagcttggtttctcacacactctacctgctttttctcatcccctttagtctctattccttgctgagatgtgttaggcattaaatggttacagtctacttctgtgtgtagtctccaaacactcagaaacctcaaaatttaaaaaaatacagaacaatatgttattaaataatcagggacaagttaaaatggtaaagagaataggccactttgtgaaatcatatgcagggaagaaaaaaatactggagtgaaaacaatataaaaataatactagatgctgtttcgtagcaccaagtgtgttctagcttctgtggttgttgctttatatcattttatataatctttacacaaaacctacaagcagatattatttcccctatttcaaaaatgagaaaaccaaggcaaatagttggtaagtagtacatatatattatcctaactctgaacttctggattcaaagaccatgttctaggataccattttgtgtaccagcatggaatatgtttttagttcatctatttactctaaaaatgtggagcatgtagtgtgagacagaactgttctaggctgtgaggaagtagctgtgaggatggtagtatgggtccctgtaataatgaaaatggaatatattggtatgtacaagtacatgctcattaaaggaaattgatgttggcatagattgcctgggttcaaattcccatttaccatgttttcctagttgtctctgtggtgagaggaggtggaatgtactagccattaccaaaattaagagagattgttggaaaaagtctcatttagcacaataacacattaaatgtattcaataaatgttacttatgactctttgagaaaacatacgtttaaaaaacatggcttatgttacacatactatatgctggctcccaaaaataaacatatttcccaagaagtgtctgttgataaagccaaatatattcttactacactaaggggaagcccatcttagcagtgtctcagcagcatattaggggcgtgggggacaaaacaggatatctgggatcttgaagtttcattttagatgggtctttcagtgtgggagcttgattaggattgggtgagggtcatgacacagcattttaagattgaacgttaggattttgagatgagggattctacagtgtggaggcataagctgtggtctgatgctttctgttgatgagttgatggtctttgggaagttcccaggatgaacaaaaatatttgcaacttttatcttcctgggcaagagtctcagaacatctacacttatatcaatgaaggtaaaatgataataatgtccccagcgaagacaggaagccatgtgggtagataatgtaagttgtgtcatttcatggttccatggataagcagctgtacttaagctgcttatcctggtggattctggagatccacacttgaaggtatcaacacagaaatatactaagaggattgtggtcagagtttgttgtcagctactgagtgaggagccaggaacatacagcttttaccaagaaaatctataccatccacactgtgatgagcccacaagaccagatatgggactttagccaaattacctaattttattatgtctttgattgctttctggtccttatctgggatatcagagatcccagagagatggcagggatgcaaattaaacattcttcccccaaaaacaacacatttttcccttataaaattactatattctgaaaaatttcatgaacctccaagtcaagatggggcattgtctaacttgcctgctgtttgctatacaatagcatggagtcagctccaggcttcccaaccctttcgaaaagcatgaattgaagaggcttaaggagagaagaaagcaacccagaattccctgtgtggttacagtttgggttcttgcctcaaggcctggtttttctctttttggagtaaagttatctgaagacctctttttctaagagaagaaactaatgggtcaaaatggaccctgggggatgtcagggactacagtgaaggcagacgttagttcacccctgaaataaatttctgtccagtgtgcagacagtagccagcagacctttgtctccatcatccaataccagtcttttcagatctagtcaatgatctatttaaagccaaaatatccttatgagactgtcaaatagtattgtatttttttgtatcactcgtcaagaatagcttagtacccggcaataaattttatagtactgatattaatagatctcaggtgaaagaaaagtcatgtgtcttataagatgggtgaaagccacctccaaatagatactctgttctctagttgtttttcatgttctattcctctgtaagttcagttacaaaagctgacttccacaaaaagttctccagtattgttttggaaccttattttctaatatcttgtcatatacgagttgagtcccaattaatgattcattatgaggaactggaaacgagaaactgagtggctcaccaaggaaaatatgtgcaaacctaacggacaatttggttatatgatttaaccactgcatgcataaattataactaggtattggactcatactgaggagtgattaaaatgtaactatgccttataagcaacataattaaatgtagctttaagccagataggcaagaaaataacaaaaggacgcagattaaaacatgacaatatatggtattgttctatgagtcttgagtggaaactctacatttcatgcagtcatctacttgggctaaaaatcatgtgtagtggccatctccttccaaagaccatcttacttctaatgagttctcattgaggtctcacgttctcagtctgaggtctccaggtctcaagatttctcagcttgaggtctccagtaatgatttaagatggtttatgcctctttgattggaagacatcactctcagtatcaactccctggaattttacttctggatgagtcgttaacagtatccgatagggtcttttccatcagggttcgagggctttctttctcaggtatctctcctggagatacctgagaccaagcctctgaatttagaccatgtgagggtcatttagtagaggaaaagctgcttgtttacctcttaataagactggataaattgcctgagttacctgcaatatttggctgtgatcacttccaataatgtagagtctagaagcagaggagatattcctagactcgtgggttggcctgttgctaactcaaaagggaagatttgatgaaccccagaagttgagctcattgtcattaaagcaaacattaggccatgtgagtttgagagtctttgatagttttgctaatttgagcttaaactttttgtttattctttctatatttcctgaagattagagtaatatggacagcagcgtttctgtgtggactggcagagctgtacaaagctctttatcatctcagtaaaatggagatagtttatacttgtactagagagagagtttgggaacataaaatcatgtcaaattttgctctggcagagctggaaatctccaaacaaggcctcaatctatcctccaaataagcgaacaattaccatacatactcaaaacccattgcagaaggtacttacaaaatctgtaagtgttctaaggggccctgagattcttgttcatgccccatctttgcatttttaccaagattatactggtaacaaataagacaccgcatgcaacctcaataatcttagtgaaatttctccatcaatgttgattgagtgcagtagccaatttttctttgcttaggtagttaattgcatattaaatgtttgaaacatcccgtttaaggtcctctggcgctactaagcatctatcctagagtgtgagagattttcctcttgcaatttacctgcagatttatattagtaacggtttgccaactgtggaaccaattgttgacattctataagaacctgtttgaacccgtcagaaggtttgattatgaggaccaggatcttagtgagggctccatgctggggcctcctggtatccccatcttgtattagtgtttgtttttttaatagccacatctttagcaagctttacaatactcaaaagttcttttatttgctgaccatttttagtagaggctcctgctgagattgagaactctgtttgttcacaaacaagaccaagaactacacacaaagcatacctgccaccagcactctcctatctcactcaaactgaccagatctgtagagcgaaatgagtcctgtcatctggcagattttgcctctggtagtgattataagggtgaagtatgtcacatcatgtgccatctgatattcttttgtcccagtcttaaagtacagcacatcaaagaacaagatgaaacatggatttttaaaaagagattactaatacatctatttagggcatagtttgtaaacaaagacagtacacagcttcttcttaaggtaatggaaaaagtagcaattttgaaagtattgccataagtaataaagatgtgaggtgctgatgtgaagtaatatttcataggaatttaagcctctatgctgaaaagtatgtattttcaattttgtgtattttcagtaaaggttatccagcaagagggactatgaaacttaaaggagaccctaacctaaaccaagccagcagaggcttccagtaatttagctgttgtggctattgccactgggtgaagatacagacttcaatgagctggcccctgaggattctcctgaaatgcatttagaacaccaagagcttatccccagcactcatatacaaactggtagagagttctgtgataattaggtaggcctaaagtgggaggtcattggaaggctaattttaactcacaaaaatctctttgtgattaggttcttagggctcagttttggctactcataaagtgggtaagtcagagagatgggaaattttggaaaattttggaatgttctgcaataagcatccaaggaaacccaggaatcctcttaatgatctcttaactactagcctgaaaagttttggatagcttataatctatcaggcataaaggattcatcttcttgggataaatcacatcataggtaacgaacttaaacaaaattctaacttctctttggaaattgtatgacctttctgagctaaaacaaagtagataggtagaataagtcttagaacttgctttgtctttagaacacagtcactggtcattcatattatctattgataagagtggaatcacagaaatttagggtccttgaaatcgttgtgaaaagtaggaaggtatctaagtaaatccaggggatatagtacaagtatgctgttgattttgcctagggtgtaccaacaagtatagagtattttaatacaaaggcactataacaaaaaagtagaacacaaatctgccactataagatatgcagcctcaaggactcagtggaaataagatggtatttgggtggggtatgataaacagcgattattctatttatggttctgaagtcctgaaaaaatctgctatctctgccactgggtttttgagcatggagtgtaaaagaattataagggctgttacaaagtttttagctattattttagtcctttagtcctttttaatctcttggttttagaagagattgtgcaagttgggtagcagttaaggtggataaatctgagtcttaaccgggtttatccataagaatgtcaagcacttccttgagatcttcaattttggcttgatttagattcaatagtagtcgtgaatcaatgtccagattatctatggtttctttatgagtgagggagtcagagactcaaggtctagaccatccagatagcatttaatttacagttccacccacgtagtaacttcctacctatcatgtgagtgaatatggtattacagagaaagaaagagtgtaatttagttaaagtccaagggtggctgtaatgggctgggatgtgaggaatatttgataattattgcagaaacctaccatgtgagtagtttattttcaatgaagaggttgtgtaatagtgataaggtttaaggttgatgatatttagcacccatatcagttaaaaaaatttgcagagttgtcatttaatatttagagaaagttttctttttgacttgaaagatgaaatgttttgtgcttgatacccaccggaagcaccttgatttgtcacttatttcatgttttgccctttgattctgagctaatgcaaaacaagtgttttccaatttccttactgcttacaggcgtctttatcaagagacttccttattccgggtttaatgtctgggataggaggatgtaattttatctctactttgattttttttaatgaaactctttcaaaatgtttagtgaggtgctagagatctgataatgggaataatattgctcattgtagtttttttttacatattaaatcctgtttttttggcttcagttcctttctgcaaaatggggaaagatgtgtgtgggctcatatctgcttcaaggtctactgagtccttcctaagggtattaaagagcctatcttcaatttctccaatggacacatcctttctttgcttgcaggactggattataaaacaatctattttcacagggaagactttaggggtagtctccaaaagaccttgtccaatatcttcagtttttctaaaattctttgtttcctgtaaaatttgaaactctttggtttcctgtggtcttttatgtcaccactgagactgacccattttgcctttttcatgtacttttttgcatctagggttatcactaaaatatgaactccttggtatagatttgggagccctggattctaacttcctaaagatgttttataatcctcgcaagttttcctctattctgcctgtgctttgaagagcctttgacggggtctctcatctcagagttagatggcttaaaatcaaccacagatgtttccctgttgtgagggtagtttaacatgaagaggtcattgagctttggggttttctggctgtctgaaagagaagaaaaattgttcagagggagagatgggggagagaataataataggataaagtctatttggtttgagttatgatttgttggtatctaaaacagagagagagttttttttttcttttgccctggctaacaaatttcataagaaagcagttttgaaatctgaattgcctttggatgtttctcagattaattaaaaatgtagactactggatgtttgaaattttgatctatttttattttaatgtactcttaaaaaattttgttcatagaaaaacttcccccaaagtggctgctataattgtaactcatctctgttgaaattatgccatttaaataagtatatgaatgtggattatcttataaacatatggaagaagaagtccagagggcgtttggaattagaatgagactggaggcataccctgaaagtgtggtaaaactctgaaaaaaatgttgcttatgaccccttgggtctctcaacctgatttctacattgtctaactgtagacctgaaggaatttgcagtttcttgggggtacataagatgttaataggggatttctcttagaaccagactgatgatcaagacaagattgaggaaaattgtcataggttttgataaggacctagggaaaaatttctccaaaggacagcaggctgagaagaaatcttacaaacttctccatccctggggctgtcttgagggatccacttacctgggtctctctcactctcttccctatgaacattccttatatatacacatgaagtggcaaagacaaaggcgaagagtagcatcactagtaataaggcagtttcaccaaagataaatttttttcaagtctgatcaaagtgttcctgaaaagagttccttacccttaggagacaaaataatctcagtatactgggagttcaatgaaaatatactggggctcagtccaatttgatttacttaatacactgttgcactaagagatagtcctgaccaggaagctaaaaggatatctgaggaggacaatgaattaaggttctgaattaaggttcttgtgcctaggctgcaaagaggtctcaatctttatggatcttggtgagatctccaagattgttcaatactgaattcctagaaatacaacctgaagaatattttgataaggcaaagctgagtttattcttaatgtggtaagagaaagcaatcccctaatagatattaataacattttggacaaggaaggacaaagttagaatatttatgagactttaaaggctcatttaagatgggtctttaaatgccagggcttgattaggatttggcgaggattatgataaaagagtttactgttggtggacacagcaaagtaaagatttggaggtgagggattcaaaaactcttagaatataagctattgtctgatgttttctactgatgagttaataagtttctaaggaagttcttgtaataaataataaacattattcacaacttttatttttctgagcaagaatttactggaatagtaaagtgaaaatagtgccagtgaaaatagtggaaaatttaaattggaggcaattagccatgagagtgtacatgattttgtttctcacagtgtcagttaacatttcccctctgtgcaaatccttcaatagtttacaatttgtttataataaatgtccgtagaatggcccacaaaactggacctggtcaagccactttctgtcacctcttacctcttagctactacttgctgttctggaaccactgggccagcttctgcaccagattctctcttggccccaagcatttttccaccgtctctctctctctgcttactcctctgccatcatcagttgtcaactaggctaacctggtacacttctctaagtatcaatatcactacaatgttgctctttacccctttccactattttcaacactgatcatgtaatataaaatattatttaatattttaaatgattatccatctccttgcactagaatgtaaacatgctgactgtagagatttttgtctttgtcttttactgctccaacaccaattctctgactttgaaggcaataaaaactgactttaaacctgaaaagaaagagctaaattgccttccagttctttgaagtaaaagtttatacttcaaaagaattgctctggaaagggagaaactgcaagagaaatttcaacttcttgcttctcaaagagaaaggcaaaattatataaaattttgaggaagggtggcatttaggttaaatttataataaacagtatagctgggttagatggaagcaaatggagttggtcagatggggttgatttgatcaaagccaagtggaaatgattggaaggattagagagcagaccagtacaagcagtgcttgctgatgtggacatttaagtgaaaactcattttgaccaattttgcagcttcctgagtatggggtgaggatatcctgttctttaggggataataagattttcagcttcttttgtacatgtgatgatgcctttaggcaagggtgatatttttcattctcatgaccaaagcacagaccataagtctgaacacagaacactatacatggtaatctaggtactctatttgcctttgtaggtgattgcaattttttccttatttaaaattttaagaccataaagaatacttgaaaagtaactttttaccaatcatttaaaaaatactgattaaatgataaaatcccttaaaaacacagttaatgcaaaagccacaaaaagaaatataaaatatagctttacatctgttaaagacactgaacacataattaaaatattcccaaacaacaatgctccatgctgaaatgttccactagtaaatttttacaaatatttaagggaaaaatgtataattttcattttctcaggatagctgacttctagtaactaaacatgacaaagaactataaaaattgaatttacagaacatggctactaggaatatagatccaagtagcctgaacacaataatagtaaatcaaattatgtgaatttttttttttttgagatggagtcttgctctcttgcccatgttggagtgcagtggcacgatctctgctcactacaaccttacaacctccacatcccaggttcaagtgatcctcctgcctcagccccactagtagctgggattacaggcacttgccaccatgccagtttaatttttgtatttttagtagagacagggttttgccatgctggccaggctggtcttgaactcccgacctcaggtgatccacctgcctcggcctcccaaagtgctgggattataggcatgagccaccgcacccagccaaaatatttttttaaaaggtcactgcattataatcatttggggtttacttgagaaatgaagattttttttttaaacattcaaaaaatcattcaacacttctggtttcagctctgatatgtgaggaacttgtaagttataattactgtccttataacaagataaagcagaacaaattgaaaaaaaaatcaattatttcctttaacccatcagagaactgaggcttcagggaaagttgccaccccaaagtctggggacaccgattgatacacagctgaaatttgcttagctggaacagaagccactggagccacaaattgataggaacatttaaatagcaatttagatgaatagctgggctgaatgtgggctagagtgaaaggaagaaactcctgggaacccccacatttttgtgggttctacctccagaacctcaacaatttctcatggtaaagatttaagaaagatcccctcctcctttggaaagggagagaagagtaatcattgtgaaatacacccagagcattcttcataacaaagacctaacctccaggggaaaaattttatctgagccatatctcagtaagggataaggggaagggcattcctttcatttcagccttctctagctttcctgttttaccaatcaggaaataaaaaacccacaattgtcaatagagatcagcacttcaaggaaatagattggaagcaaaagaaggagggaaaagagtagagaggtcaggtggagttgagggagaggttctgccactgaaggaatgtttgtgatggttgtaacaccaagacacaggcacacagagacttattcaaaagatcatagaacactctcccctatgtcttacgaccccaccagcagtgttctgtgtaatagtagattacagttgaaatagctgtaagacaccaattctctcagaggagtacttagggaagtccaaagtcaagagcagaaacaaaagacactagaggaatttggcatttctggtgcctctagtaacagcaaacattaaacaaagcccaattcctcatcagatttctgtaaatagcattctaaagctccatttacctcagtacttactaccagatacagttcaacaaaaaattacaatgcacatcctatgacaagaaaaaacagtctgaagagagaaagcaattagcagaaccagactcagaacaaagatgttggaattaataatagagatttaaaataactatgattaatatgttaaggactcttagacatgcaaaaatagattatataagcagagagatggaaactcaaaagaagcaagaggaaatgctagaaataaaaaacactataacataaatgaagaatgccttcaacaggctcgtaagtagattcagcacagccgaggaaagattcagtgatcttgaagttaggtcaatagaaattttgcaaactaaaatgcaaatacagaaaaagaaaagaatgaagaaaatgggacagaacatccaagaactgtggaacaatttttaaaggtgcaacatagatgtaatggggatactaaaagaatggagtatagagcataatatatgtttgaagtaaaaatggccaagaatttttcaaaattaataacagacaccaaaccacaggcccagaaatctcagagaacacaaaacagtaaaaatgcaaaaaaagcaaaaacaaaaacaataaaacctacaaatatcatattcaacctgcggaaagacaaacacagaaaaagaaatctttaaagaaggtagataaaacatcctcgtcttctcatcaggaaaaaaaatccgaaagtagtaatgtggtagtcaattatggcatatggatgtgtgaaaacaatggcagcaatgccaccagagataggaaaaaaaatggaaatcctctgttataaggcacctgcactaagcgtgaagtggtatggtgtaatttgaagatgggtttagattagttaaaaatgtatattgtagccagggtgacatagcaaaacccagtcttaactaacaatacaaaaattagccaggtgtggtggcacacatctgtagttccagctacttgggaggctgaggtgggaaagttgcttgagcccgggaggcagaggttgcagtgagccgagattgcacccctgtactccagcctgggtgatacagcaagaccctgtctcaaaacaaacaaacaaacagaaatgtatattgtaagttctagctcaaccagttaaacaaataagaaaagataattgatatgctaagaaaggagataaaatggaatcatgtaacatgatcaagtaaaagtagagaacacagtaaaatagaggtcttaaagaaatagtaatgcaatgactagaaagcagttgcaaacatggaatatattgatccaactgtataaataatcacttcagatgtgaattatctacattgaaaaacagaaactctcagaatggactaagacaagaccaaactaaatggctacaagaagcctactttaaaattaaagatttggatactctgaaagtaaagggatggagaaagatataacatgcttacagtaatcaaaagacagctggagtagctatattgattttcagacacagcagaattcagaacaaggaaggttaccaggcatgaaaagtggcaatacatagtgagaaagggccaattctacaagaatatctaaacgtgtatgcacctattaacagtgtcaagatatacatgaggtaaaagttgataaaactgaaaaaagaaatagataaaccctatttatagtcagaggttccaacatccctctggcatagacataaataagaatattgataacctgaacagcattatcagttaagttgtttgatgtttatagagtactccaacaacagaagaatttacatgaatatacattattccaaagtttacatgaaatattcatgaaaacatcatattatgtgccataaaacaaatttaaaagattataaatcatactaagtactcaggtcacaatgtaataaaactagaaaccaataaagaaagacatagctgggaaatctccaaatatttggaaactaaacaacaaacttgtatataatagacacatcaaagaacaagtcattagagaaattaaaaattattttgaactaattccagctggacaatactggttacaatttgtgggatgcagctaaagtagtgcttgcaaggaaatttttagcattaaatacattaaaaagaaaaagaccaataatcaatctgaccttccaccttagaaaaatacagaacagtttaagcaaacagaagaaccttaagcaaacagaagacaagaaataataaaagaataaaaatcaatgaaatttaaaacagaaaaacagtatggaaaaccaagaaaaccaaaagttgatttgtttaaaagattggtaacattgctaaacttctagtcaggctaagcaaagaaaagaaaaaagacaaatgaccaatatcaggagtaaaggaggggacatcagtattgatcccatggacgtgaaaaggataacagaatactaagaacaactctatgcctccagatttgataaatgaaatggaccaataccttgaagtaaactaccacaacctccaaaaggaaaaataggtaacctgaatagcaatatatctattaatgaaattgaaataataattaaccttcccccaaaatagcaccatgcccagagagttttactagtgatttttactaaacatttaaggaagatgcaataccagttctccaccattacttccagaaaatagaaacagagggaagacttcccaactcattacatcacaccatcattaccctaacataataaccagataaaaacattaaaagaaagaaaaactacagaccaatatctctcatgaagattgacgtaaaactccttgacaaaatattatcaaatcgaattcaacaatgtatagaaaaaattagtaccattatgtacattatgggatttattccaggtatgcaaggctctttgaacattcaaaattcagccaatgtagtagaccgtatcaatagcctacagaagaaaaattatattattatatcaatagatgcagtaaaagcatttcacaaaattgaatattcatgatttttaaaatctcagcaatctaggaatacaaggaaatttcctcaacttgatgaaaaaattctacaaaaaaccccatagctaatatcatactgaaatgtaagagactgtatgttaatttcaggagcaaggcgaggatgtcctccaattctatgcaacatcatactggaagtcttagctagtgcaacaagacaagaaaagggaatgaggcatacagattgtgatggaagaaataaaacagtctttactcaaggatgacatggagaaaatcccaaagaatccacaaaagaaaaacttggagctaataagtgagtataacaaagttaaaggatataaggttgatatacaaaaaccaattgcttacctataaaccagtaatagtctattgaaattagaaaaaaactataatagcaccataacaaaagcaaataaaacccttacttataaacctaaagaaaaacaggttcaggatctatatgtctatatgtagaagactataaaactttgataagagaaatcaaagaagatcaaaataaatgaacagatatatcctgtatccatagatagaagactcaatattataaaaatgtcagttcttcctaactttatagactcaattcaattctattcaaaatcccagcaggctattttgtagatgttgacaaagaataaccaacataacactgaagaagcacaaagacagaggagaaatactacctgattttaagacttttactagaagctgcagtaatcaagactttgtggtactggcaaaagaacagatacataagttaatagtacagaatagagagcccagaaatagacaccacacaaatataattaactgacctgtgtcagggaacaaagacaatccaatgcataaaagaatagtcttttcagttaatggtgctgcaacaaggagatgtctgtatgtgaaaaagtgaacctagacataggttttagatatttcacaaaaattaactcaaaatagaccatagaactaaatatgaaatgcaaagtgttaataattctaaaagaatacaagagaaaatgtatttgatcttgggttttgtgatggggaacaccaaagacacagaccatgaagggaaaaaaatggtaagcttttaaaatataagttctgtttggaaaaaggcacttaattaaaagataagccacagattgggggaaaatattttcaaagtacatatctaataaaggtattctagtcaactgtatagagaactcttaaaactcagcaataagaaaacaaatgaccaattaaaaaataggcaaaagatctgaacagacaccataccaaaaaacaaaaacaaatacaaatgataaatacacttatgtaaagatgcttaacattttctgtcactggagataaaaaataataaaataccactacacatgtactcatatacatgtacacagtacacatatacactacacacagtacacatgtattcccatgtaatagaatggctaaaatccatccaaagcctgatcatgccaacttctgttgaaaaggcaagcaacattaattggtgatggaaatgcaaaatagcacagccacttttgaagacagtttggcagtttcttagaaagctaaatgttgtcctgccatatatctagccactacgctccttggtatttacccaactaatctgaaaacttacgtccacataaatgccagcacatgaatattacagctttattcataatgaccaaaacctgaaattaactaaaatatcattcaataggtggatggataaactgtgatacatttatacaatagaatactatcaagcaataaaaaggattaacccatcaagccacacaaaaacatggataaatcatagatgcatattgctgagtaaaagaagccaatctgaaaagaatacatacaatattcttcatttttgtaacattctgggcaaggcaaaactatagatatcaatggttggcagggttcaggcgaaggggcagggatttaatagataaatcacagcaaatctattctgtatggtactgtaatagtgtatacattatactgtgcgtttgtcaaaacacagtgaactttaaagcacaaatgaaccttaatgtacacaaattttaaaaaatcatttaggagtttgggggatccaagatggaacacagtgtctgacaaaagaatccaggtgttttacaaatgtattagacaagcttacgaataatgttggggagaaaagataatgacttaagtaactttgaaaatgagtggaatctgttaagactagaggcaaagtgactgtacaggagcactgcacactatttgataaagttgttttctgtaggtgtatgagttagcaattctaaatcatgatacatatgtatattggaattgaacaattaagtaaatggttggcagatggtgtacattttcttattgttggaatgaaaagttacagacaagaagaaaagaatgatttgtgttgtaatggattagagttggaaacgtcagtgtaaacttatgtttagtttaatatgcagacagatggttacacatagaaatatagatgcatgtatttacatagttattgtacacaccctgtgtcaactgagaatgcttagaagcaatgacactctagtaacaatgggcacacctagaacccagcccttagtttctaataccattctccaatagaacaaatcagggatccttgtagaaatggctgattctaagactggttaggaaatgtacaagatgagcctggagcatcatatagtgccagagagtaaggaagtactaaaacaagaaccccacattgatgaaagtatatcaaagggactcaggaaccaaccaaaagagcttccagtggtcaaatctggaacaaatttttaaaaataaatagcataatattagattacaacccaaagtataaaatatccatgaatccatattgatgtaaataatcaaatgaataaataaactggggagaacatagattttttgtgcagaataatttcatatagtttttatagatacttttgcccttaaggaggttgaactccttactcgtcaagtgtgggaagaaagtcattaggcacattggtgactttctttcaaagagtacagggtggaaatgggggatggaagggaagagtaactgtgcaggggagaaacctgacaagcactatctctacatggtaatcaaggttaacatcagtagtgataaatcatgctgatagtatatacctttgatatgacgtgataaaaattgcactttacctctacagtcttcctcccaaaaacccataagatcagtatcattatgagaaaaatcatcaaacaaatcccacatgagatatactctacaaaatacttgactagttttgctcaaaactgtgaaggtcctcaaaaaggaaagcttgagaaagtgtgacagtcaagaagagcctaaatagacaagacaactaaatggaatatggcatcctatatgggatcctagaagagtaatagtacattatgtaaaactatggaaatctgaataaagtgggctttagttaataataatctatcaatattggttcgttgagtgtgacaaatgtgccatattaatacaagatgttaacaggaggggaaactgggtatagggtatttgggaactctgtttcagcttcactttttaaaaaatcttcaaatgtttacttcaaaaatgaattcaaaatcactcaatgtaaatcactatggtaacataagagagaagaaaagttatatgatcatctcaaaagagaaaaagcatttgataaaatataaaaactattctttataaatctctttattggaactacgaatttatgggaactaaaaattgaaaaaaatttaatgagataaagggtatttacaaaataaattaattgtaaaattattgacagtggagatagagaaagcttttttatgagattgggaataaaagaggattttttttcatcatttctattcattactatactggatgtcctaactaggggagtagagtcatagaataaggattggaaatggaaaggtataagtttcattatttactgacaagaaacaagtctgaacatgatcaattaaaattaggaagttaattgagcaagattgctgggttaaaaagcagataactaaaatgtatttctatgtaaaatgacaaatgaaaaatgaagtttttaaaagataacatttttgggaacatcagaaacatcaattccataggaaaaaattcacacaaaatattatgaaacattatggaaaggaagcaagtaataccttacaaatggagggatataatatattcacagtggcaaattcaattacatatactatacatgttaattctcccccaaattcacttaaagatcccaacgtaagagcattctaaatctgaatgccatttattaaatgttcaatctaatttcaagaattatatatgacacaaaaagtcaagaagagccaagatagtcttgatgaagatgacaattttgcatgagttacatggccaaaatttaaggcctactattgcaaggttacagttactgacaaaagacagaaaactagcctaatggagcaaaatagagactccactccacaagcagatcaatagatatatgattacttgctttatgataaaagtgccactcctgcatgatgaggaaagaatggtttgttcaatagttagtgctggatatcaatacataaaaaagtgaattccttttcaaaccatacagatccatcatttctaggtgtaatgttggtctattcatgaaaggcaaaacagtaaagcttcttgagcatagcataacataggagggtgtcatcataatttggcagaaagtgaaaaataccaataacactaagcataaaggaaaatattgatgaattagtctgcatccaaattaaaatttttatttctcaaagtatataatcagtgaagaagcatcgtataaaagatacaacttgtacatgtcaaaaagttagaaaacacttaaatgggtacttcacaaaagaggatatctgaatggccaataagcctatgaaaaggtattcaaggtcattagccatgagaaaaataattcagacaacaatcagataaacatcttccagtatatctagacagtccccaatttataatggtttgatttatgatttttccactttatgatgttgtgaaagtggtatgcattcagtagaaaccataccttggattttgaattttcatttcccgggctagccactggcagtatgatactctagtgaggctaggcagcagcagtgagccatagctcctagcagtcatgcagttatgaaggtaaacaaccaatacttcatcgcgtactgtgctgccaccattttgacccactgtaggctaatgtaagtgttctgagcacatttaaggtaggctaggcaaagctatgatgttcagtacattaggtgtactaaaagcattttttatttacagtgtttttaacttatagtaggtttattaggaggtaactccttcataaatcaaggatcatctgtttaaaatttgaaagtgtgtgttttttagaattctcttagtattcactgaagttgaatggaggcaacatactctcaggtatatggttaacaaaaattcatgcatgattgacccaaaatatgtatacatgaatgcttatcatggtgccatatctaatagcaaaaattgaaaacaaagtgcccaggaggagttgaaggataagtaaaccttaaaatatgcacatattctctcaaggaacgtggatagtattgtgactgattcttctccatgtgtgatccacatagatgataagatcatcatgagaagaacttaattttatacttgagctttgctttgactgaaagatgagaaattttgtgattattggtatcatctctatgatgtcatattacctagattcacatattcttaactccattaaaatagaaattatatttgtgggcggggaacttattttcatccatctctgtttccttccaattgagcaattccttattttatgttaacctgattttagtggttcattgccataattcttagaaattatatctcattttttcctgtgattttactgtattgaagtaaatctggttggcaggatatacaatattacatgaatgaaatttgcctttggtaactgagaaagttcaaatagaccttggttctagcgaagacttgtttctaaggaatttagattcattctttcagacagtatgaatatcattatggggtcttcttcatgagttatgtatgtgatgggattcttgtaagattttcaccttttacctgagcttgccttgactgaaagttgagaaaattttgtgattcattggtataatttctacagtgcaatatttatttggatctaagcatgcaagtaaaaaaattcatccctgttatagtatttcaggtttgcagtacgttatgacatttgtagatcattgatggactatgaatattcaagggacctggcaattgtacccaggggattgagatccagatacttgtttgtttgcccatagatataaaattaggagcttcctgatatctaatttacttttttaggaataacacccatgagatacagttctcatctactgccctactcctgtccttagataaataacaccggaagaagaagactctctggcctcttacatcagggacacatgaaaagccacactgaatatgtatgaactccaatatactttcacagaagggtttaaggatgccatccctggttataatttttaggaccaaatatatatatatatacacacatacacacacatttaggatagatatatatttaggatatataggataaatatatatatttagtgccatggtttgggtcatgaggaggtttgatgacataaaaattatgctcataagtattatgctgagacccattcttgggaggagatgtgggggtgtcctaggctgtgcaaaacatagctatggaaacagaagttattaagagaaaagaacaagcagtcagtgagaatttagataagagactgtaatagaataaaagtatcagattagtgaatggttgtcctagtaatttggaagaaaaggaataaaaaatggagtcagactactaaatggcaaaaataaagacttgaagaacttaattttatacctgagctttgctttgattgaaagttgagaaatcttgtgatttgtcggtatcatcatctcaaatcaacttatttttcatctcaacatgaagaatatcagctctagccttttggaatttcagcaactcagatgcttgttagaacttatccaggactgcttgcaggacccaaaatactaataatccatatgcctttttttccagctgaaattagctgtcttaagagttgtttttcagtgctctgaggatatccacaaatatatcccaaggcactctgaagtgtgttttcaatctttggccctgcacactggggatgcccactggatgttgcatggagtgttgcctccagttgactttgatagacacaataaacaccacgtgagagccccctcatgaaggagggctgaggacttggagtccaattctccacctcccctgacagataggctattcaatgccttgggaatccgacatgaaggactgcttatagcagtccttgaaaactttctacagaatgtgaactgggagaagctaaatgctgtactcacaagctgggtgacttctccattgatttttaccatagctcactgaaacattttctaaattaacaggtataaattcacagacagatcagaatagatccttggtcctttccatttttctggcacttttgttgccaggaattcaaatacaactaagagaaaaagtgggtagctagcaagaacagatagtttctcaaatattagtggcagtaacccaactttgagaaaatatggagaaagagaagaaaaaacccttaagactgcagtgttagctgcccagttacaattattcacaaagtgagcaaatacttatttgggccaccaataaataagagggcacaagctaacgggaaattaatacgtcactcatgtaaaaagtcaacacattagaaaaaggaatcttggatgagattgagaaagatgcaagggataaaacctgacaagctttacaacctccttgaggaggtcttccctactctgtaaaatcagacagaaaatcattggcaaatggagcaaagcatgggcaaaactgatataatgaggaaacagagctgggaaaggataaatttatgtgtctgtttctgtttcctatcttttaatccttttttaccctttcttctggatactggagcaacgtattctgcaatttctacaggccttttctgttttatcctaaactaggaaaatatccagatataagtatttctggactatctgctacctcttctttctcctctgaggttttcatgcaaataggcgaggtcctatttgcataaaataggaagaatatgccttgtctcctaatatgcccaataatcttttaagaaagggcctgctgtgtaaaccaagggctatgatcttctgtactctgaagagagtgcttttggagcttctgggatgcaaggtatctacattgctaaatatgtgctttctgaaacaaaagatggctgtgggagagtaggagtctcactcaatgctggagaagcactcccaagttacagaaaataaacccatatctatgagtcctaggaacaaatgataaagatttaacaaaagagatcaataccattgttgtaacttacaacagagaaaaaccttggccatgtatagaacattttctctatttttacctcaaatatgatgtaattagaaaaattttaaaaaacgtggcatagttaaaaaaaaatggcacattcacttcataatgcttccatattgcctgtgggaaagttaggaaaacttgacagggaaggtcaaactgtttatagatttatgcatgatcttagagaaacaagttgtgattcctctgacacttgtaattcccagccttgccactgttttaatatctgttcctgagttatctaagtatttttctgtcatggatttatgttcaatgttttgttctccatgtttagctggggagtcgaggttcctgtttgagtttacctgtggagcgggaggctttcaatatttgtggcaacggatcttcctggaattcagagagtcacctactccattctctgggcatttataagaaaatataaagaatattcctcacattaggattccatactaattgttattgatagctgctaataacttacatgctagtaaagaagacattttagctttactaaatttcttagactcccaggacgtaaaacctcgctagctaagttgcaatattaccaactgaagtaaaatatttgggatctgtgttattggcagatggaaggtggttgcatcttgaagtcagcctaatatacaaatgaaacaacatgccaaaaaaaaacttcaccgattttgaggattaattgtagatctttgcgttttatgaaaaggctaagcctctcactgagatgttacatgaaacatcactagaactctttattaaagtcaaaataaggctgaagaagtcttttatgcccttaaaatagctgctatttcttcacttgtattacttttttaaccttgttaaaaaaggagttctaccttttctgtcttgagattaagggttactccaaaattaggccttgattataggcacattgcttactttcccaggttcttgtattttgtctctctggaaatgcgatgatatttataaggtacagtggcaaccactcccctgattaaaaaggctcattcagtccttgactctgagaaatttaacttacttacaggtacttcatgttgttactgctattttacaagttcataagacacaacacttgtcagtatgctgtcaaacgagctaagaacaagtcttattgtgtgatcctaatgctattctaggaaggtgtaaccttttgacagctattctgtggccagatcttgacagaataagttgaacttgactgtctcagagtgattgaggaagacactggagcatggtctaatttttgtaatattcctattcccaatgttgactgaatattcatgaatatattctgtgtgaaagacccacaaaggaatataaaagcatgttctacggtaatcaaccctcatgaagcttagaggcttctgtttttcgaaacataaaatcagcccaagtggcagaattgtagttattataccagctgttaaattagccaccagttataaagcagatatctatactggtaataactatatgtttgtggtctgttatgtgactagccaactttggaagaatagatgctaacgtcaataggaactaaaatattacatgagaagctaatttctgatttagtagagtcattcaaacttctctaacagatttatgtaatttattgtagagctcacagtggaaaacaagattaactctttaaaaagaaattaatttgcagacctagctgtgaagggcttctgacgtttagactggggaaatcaaacctctatcacttctgtccaaaacctcctattcataatttcagaaatagccaactctcttaagaattagaaaattaggaatgaaggagaactaagatgaacaccataggaaaatgagaattacataatgaaatctttcctttattccgattgttatatgattgagtggctttttcatgccaccaacaagttcgttcaagcaaaaggaatatgctgacaacttgaaatctttgtaatagcatcatataattcaggaaataatatgaagatatgctctttgtcagaaaaattctttccttacctaaaataagtcaagaaagcctactaaggcccatgatacctaggatctgctggcacaagaactttatagaacttccacctttagaagatagtaaatatttttaccagtgttgtgtattggtgtctggataggctaaagcagatgctcaaacagtgatcaagctcttactgaatcatatcatctcaaccactggaattcctgaatatctggaattcagtaggggaatcattctgtatttgtgggaattcgggaattttgtaatactctacaaataccaataatttacctacctgttatccccagtcttctgaacaagtggaatgagtgaaccacataccctaaagaattatttagctgaattatttagctaagttatgtaaaaccttaccatccgtttcatttaaaataagattaaatccctctagcaagcccaacattactccctttgagtttggaaggtctactaatcttgggcttaagcctaaccctttctctgatacaatggaaaatcctcatgaccatatatgatacttaaagagtttgtgggtttccctaggctcaccttgccaacatgtggccagatgctgaaaaagccgcctggggaagtgtgtcattgatattgaacaggagattcagtctatatcaaagtgttctgatgacagactgtgaccacactggacagaaccctatcaagtgtggttgagaattcatagtgctatcaagatgaaggagaaacccaagtggatacacgcttcacatgtgagaccaacatccaccatcgagtggggtataattcccatttaggaccttaaggataaattctctagatagtaaccttgaataatatgcaagctaaagagaaaaacttatttgatagacagcaggagagatagactgttttgttattaatacgttcttcttaattattttgaccattataattttgatacttagtttgtattaattttgatacttagtttgtatcaattgaacataaagcttattattagtctttcttttaaaagttagtatctcaacctcaaggaattttgtggtaattaaaaattgtcctgaatatgagatcaggacttaagaaacccctttctttgtcataatacttcaaactcaccaactggatgatttaaattcagaagacatgaaaaatttcaaatcttcccactgattagtcaatattacaaaaatcttaaatatcatcaccctttgtgttattgaagatactgatgagaagaaatttttaactaattaagttgaacgtaattatattcaaattgaaagtccctgaagggtatcacaaaactccaacaactctgtatcttttttttttttgagcagagtttcaccttattgcccaggctagagtgcaatggcacgatcttggctcaccacaacctctgcctcccaggttcaagcgattctcctgcctcagcctcctgagtagctgggattatagacatgcaccaccatgcctggctaattttgtattttttgtagagatggggtttctccatgttggtcaggatggtctcaaacttccaacctcaggtgatccacccgcctttgactcccaaagtgctgggattacaggtgtaagccaccacgcccggcccaactctagatcttaaatagccatgggggtccaatttaataaagcttaaatagacacacagatgagaaaatatcccagcccaaatggtgagggttagtttcttcaaaacccccaaaacgtatcatcacctaaaaatgagcttaccctgtttagaacctggcagtctccagtccccatacttacaaactcgaggataattaaatggtctgtatcatttaatattacaatagctaatgtgagtaaactgaattctacttgtacatgataggctttaccactatgaaatgtttttacacagggactaaaatggcactatgatcaaactgaaagagatttctttttttaatagatggggtctggctttgttgcctacactggagtgcagtagcacaatcatagctgtctatcgcctgtaactcctgggctcaagggcttcctccgtctcagcttcctgagtagctgggactacagggacatgccaccatgcctgcctatttttttttgtagagtcagggtcttgctcaggctggtttcgaacttctggcctcaagtgatcctgctgcctcggccttccgaagcactgggttcgcagacataagccaccatacctggccagagattattaaatacagtattagggggaataaaactaggactacaattgtaaactcttctgatatagaaacaattactgataaacagtgcattggacaatttgcagaaagatgcaaacatgatagaatcaaaatctaaacaagatatgacaaagaaaaacaaaaatggaattgggaaagcatttggaattggacatctggtaataaaattctattgcaaaaaaatatatagtaaagaattttcagaagccttcacttgcattagtgcacaaccactggttattcaacaactacaatgtatacttgctggtactgaagtacaagattatacctactcagacaaacaattaggtattggacatactactgtctatgtagagattaaatgatagtgtaaaaaggttgatcatattataggtaaaagagctgaaatctggcattgcagattgaaatttctgaaaactgaaataataaaactaatttcactaaagtatgtacattttcttatttacatagtttataatgtgttatataattcatgaatcttcaaaagaaatatactgagctattcaataaaaatttacattacagctttaggccaccaagccccatctattgattatgtacttggtgtaaattggcggggggaacaaaacaagagtgaaaactgagcctcaaaatacaaagcatgtagcaaaacagactactaaaattattctcaatttctaagcccattatatgatgcaggagaattcttatgtgtaggtaataaagaatctgttcaaatatgcatcagtggtatgacagtttcaaataacccactgaactaggaaatattcaccaccaaggaggtcaggtatactgatttggtcaacctggatattgacatgggatgttcttacggattgacagctccacttgatgctatcctatcacaaaatattattacctgatgttgatataattaacaagtcaatacaaaaagtaaggtctctctacaagacaagactaacatctctgtaatataaatgggactctgagtgtaatagatttagggtttctgcaagaattttgaaagttaaggatccaacgcctgtaatcccagcactttgggaggccgagacgggtggatcacgaggtcaagagattgagaccatcctggccaacatggtgaaaccccgtctctaataaaaatacaaaaaaaaaaaaaaaatagctggacatggtggcacacacctgtaatccccgctactcgggaggctgaggcaggagaatcgcgtgaaccagggaggcagaggttgcagtgagccgagatcgtaccactgcactctggcctggcaacagagcgagactctgtctcaaaaaaacaggaaagcaaaagaaaaagttaaggatcctaccaacaaaattggaatatgagactgaggaaattcctattccagctaaacccagaattgattatgttgatgaacacatgaatttcatgtgtgtgaaaacatatgaactcctcattgtcagtctaatgagagtgaaaacaacacatcgaagatgcggggagacgacaatacagagtgggctcataactgcattctagatactgggattactttccattaaggtatataattttagaatatctcacaaatagcccatgcaaaatcctgcggaaaggcaaccataaatatagagagaatatgtaaaaaagtggcatggtctagtatatgccaaacaaggcaagggtatacaaaaacctcaaggtcccagtatgacaaatcatgcttgtattgcacacccattaaaaagtcttctaaaaagtttttttaatggtgtgcaggcaggtttattcagaaaaagctcggattcatacttgtaaaagtctgagaaaagcattaaaatgctattatgatacagttgacccaaacaacacaggtttgagctgtgcaggtccacttatctgtggattttcttctacctctgccactgagacagaaagacaaactcctcctgctcctcagactactcagcatgaagatgaggatgaagacctttaggatgattcacttcttcctaatgaatagtgaatgtattacttccttaataacgtttttttttctctagcttcttgtaagaatacagtatataatatatgcaacacaaaaaatacgtgttaatcaactgctttatgttatcagtaaggcttccagtcaatgggagactaactactaattaagtttttggggagtcaagttatatgcagattctccactgagcaaatgttcagcactcttaactcctgtggtgttcaagtgtcaactgtatatatgtttaagagttattgtttacccagtagatcaagccaagaccaagttaggtttatgtgtttttggcttaacctaagaaaatgttcagactaaagcagtccatcaatagaacagactgccttttaaaccagggaacaacttgtctttgtaggtattttaggtatatgaatgaccatatgtgatctgctttgggtcatctatggtcccttccaacttaaaacttctctattcatgaacattgcataactgaattgtggatttcatataaataatatcttgttgcctactttaggtttgaaatgttttccttctcagttgcatagatatgtatagcaccatccccactatgaactctcatgtagaaaataccagattctaaagtcatctgtgaggctaaatgtcagacttaggcacttccacataatgctgcaaaaagcaacagcttaaaggtattacttgctcaacatgtcattccaaacacatacactatgattagcagctgaatttaacagtatctttccactttgaaaaacactttatatacctttacaaagaagccatagtatctcagggtagaaaaactcaacaggtagaaaacatggccttctcttagaaatgagctacgtaattttgagtacttatctcaaaatcattgcagaaacatatctagtgcttatggaaaaagaatcaaaagatctttttttttagctaaagattttgagtttttcttgtgacatttaagtcttttaatgtatgctgatttttatgattatctaactgtttcataatggttattcttgcctccatgaaagggaagactagaacaaaaacctgacaagaacaagttctagctccatcaccgacttactgagtgaccctaggcaaatcatgtgggctctttcttgtgttttaagttttacctccaatgaagtaactgcctcagactagctgtgaagctctcataaagtgatggatttgaaaatgccttgcaaagaatgagcagttaatacatagaaagtttcatgtacttccgtatattgcatgatgcccacccagggttaggttgataacagttgttgatccaataatgaaagaaataaaaagaactctttaaaataacgaagtaaaatagctaattttcctgttgtagttttaaaaattatataaactatataactaaacatatttatgtttattatatataatatgatatgcaattacataagacattattatataatgtttttatataatgcttaagtaattaaacaattatatttaaatataagttatactttccttccccagataagacaaagaacctgtttacttctctgagggatttattggttcctgtgaaatctgtggaggccgctaacactccatagccagagaatgacaacatatgattttcttttcagtcttgtagtatccacagtagtgatgtctgtccatgtacaagtgtctgtccaggacatccattaaattccatgcctgctctgtgtgttatgagggcagggacagaagacagattcactggtggtactttcaaacaatgtggtaggccttccttttggggtctgccatgacaatgataccccaggcggcaatgctaaggcccatgaccatcttcataatggtccatggacccggggggtatcccatcttcatgggcttctgtgccacccagtacacatacccgcctgcccccatcagccgcaacccagaaagcacgtgacagctccagcaggtctccaacaggtggtgttctgctggtgaggtcggcgatccgggtgtagctggggttgcaggcttggcaggcacggcggcggtatcgggaggcacagcgatcttgagggactcaaaaggctgggacaactgagaccccgtgttctggaactcggcctccctaaaaattatgttttaaaaaatacatagaatcggtaagatgaggaaaaagcataaaacggtcaaaaacactgggataattcaaggttcattttgacaatggtaatacaaatagaaaaactgacaaaaaagaaaatacatcttacattagaaaacatacaagagtagttgtatacaaacgaagacacgtaccaaaaataagttacaaaatatgaatgcatatacataaaaaatgtagtttcaaacaattcaaaagtaaaatgatgcaagacattaaaatattcacaaacacgctcgaaaaataagagctgacgcccaaattagaccagttcaacggaagtgtggggtgtggttggggatccgccgcagaaatcacgtggcgcccaggccaaggctgcaatttcccatgctgcttggagaagacgcctgggagggctcccaccatgcccaggggcaggctatgtgactgcccggtctgcagctgtaagtggtttctgggccagtctctttgtctggtcatgacctggttggtggccctagcttgtgccgagtggtcccggagtggcccagggggttgtgtgtggggagccagcgtgggcagcggaggtgctccctggggcctgcagtagggcacagcctctgcatcttgtgtgagcccagtgacccgcctgtcctgtccttccagggttgggtggcagggagggccaagggtgccctgcgtccgtgacgggtcagcgtttccagcaaatgggtccatggagggagagcctagctgagccggcgggctctaccaccttcatgaggttctgtttggacacctgtcctactcctgttcccccagatggtgaccatggaggaagacttgtgttgggcccaatggccctcggccagtgtccgtctgccaggtgccagcccccggtgcgctgaagctcaggccattcctgatgccctggcctcctgcactgagctgtggtgagcccatccgggtcctgctggatacatgggcggggaggggggtgccctgggttgtgttgatgatgagaaccttatattatcctgaagagaggtgatgacttaaaaatcatgctcaataggattacgctgaggcccagcctaggtgagaattttggaagaggatgctgggatccagaggcccccgacggggccactgtatttcgggctgcagacctagaggccctgaagggcatctgaaggtggcccaagcctatctctgagcaaccccgtgaggcagtcaaggatccctgtgtgggcataggctggggctctggttccctaggggcagggcatgtgggtggctcctccctgacccccattctcccctgtgtctttcagtgagctcttctgcccaggcaggccccctggcattgaccggcataggtgagtggatcctgctggggtcatgggccatgagccaggctgctggggtcgccaagggtcagcctttgggacaggagggtttccttagggagccaacctgaatccccactggggagggctaggttctccaggagggcagcttccttgggagtctgacccaaggaggatatcttctctaaagccctgcagtggtgagggtggtccaggcagcaaagggttccttcaaccccacccaggacagcgcccagctgagactcagtgtgcaggtctggccatgaggactgcccaggtcacataagggggtccataggagctccggggcaccacaggggtcacacaggagctctccttccccagagaggggtgagcgattgggcctatggggtcaggcctttggagatcaaggattgggccccacccatgaacctgaatgggactgagcctttgagcaatggaccatcccagtggtgcctcggagcctagtcgggggtgatgtggcttcaagggggttgggtcaaggctgagctctggccggtgcctggtagtgctgcaggctggccctgggactcgctggctttgggcaaaggggccagcccgtgtcccactggaggtcaccccttccctgtgggcaactagcaggaagggtggcatccttagctgggaaggcccactgtcgagggtcctgtccagggaatttgcctcccaggcttcttctgatccacggactcacctccagggtggtggggtcttgggcccgaggaaaggagaagataccctgtgttccccagttggctgagtgtggcttggctctgtgtttgggaggtgtgtagggtatgaatggggacccaccagagaacacacatggcccagggccccaggttatgatttcccatgcacacttggagagaactctgggtgagtgccctccactcccaggcacaggctatgcaactgccaggtctgcagtggcatgtggcttccaggtcagcctccttggttggccatgagcaggttggttgccctgtcctgtgcccagtggtcttggagtggcccaggggtcctgcaggggagctggtgtgggtagtggaggtgcttgtggggcctgcaatagagcgcagcctaggtgccttgcacgagctcagtgacccacctgccctgtcctagtcctagctcagtgacccacccccgctttgcagtgatggggagtaccaagcgtctcctgcgtctgtgatgggtcagtgttcccatcacatgggtccatggagggagagcatgcatgagctggcaccacccaccaccttcccactatggaggcgtgaggccatgtttggacacatgtcttcttgtccccccagacagtgagcctggaggaagacttgccctggtcccactgtccctgggccagtgtccatcagccaggtgcccagaccccagtgcgctgaagctcagccctccctggcactctggtctcctgcactgagctgtggtgagcacatccaggtcctgctggatgtttgcatggggaggggctttccccgggttgggtcgatgatgagaagcttctgttttcttgaagagaggtgatgacttaaaaatcatgctcaataggattatgctgaggcccagcctaggtgagaattttggaagaggatgctgggatccccggcaggagggattttgggctggagacctggaggccctgaagggtatctgcaggggccccatccctgtctctgcacttgtctgtgaggcagcccagtttccctgtgtgggcttcgtgtcagtgctctggttccctggagcagggcacgtgggtggctcatccctgaagtcacgttctccctttgtgtctttcagtgagctcttccgcccatgagggccccctggccttgagcagcataggtgagcggatcctgctgggctcatggaccaggccacatggggtcactgagggtcagccttcaggacaggagggattcctcagggagacaacctgaatccccactggtgagggattggttctccaggagaaccacctccttgggaatctgacccaaggaggacaccttccctgaagccctgcaggagtgacagtggtccaggcaggaaagggttccattagtcccatgcagggcagctcccagctgagacttggtgctagggtctggcctcgaggactgcccaggccacatgaggcagggtctcaggctgctatttccagtgcatgcttggagagggagcctgggtaggccccctccctgtgcaggggcaggctgtgcatctgctggggctgcagcggtgcctgccttcaggaccagcctccttggttggcttgagctggatagtggccttggccccacccaggggtcatggtgcagcccaggaattgcaggggagctggcatggggagtggaggtgctccaggggcttgcagtagggcacagcctgggcatcttgcttgagcccagtgaccagcctgccctgttttccagggttcagtggcagggaggaccaagggtcccccacgtccatgactatcactgtttcacatggatcccatcaggtgggtccatggagggagagcatgtgtgagtcagcaccccctgcctcctttcccgcatggaggcatgaggttctgttcggacacttttccctgtctctccagatggtgaccctgaaggaggacttgtgttgggcccaatggcctggggccagtgtctgtcagccaggtgcccagcccctggcgtgctgaagtttgggcccttcctggtgccctgttctatcgggggaacccgcccccaataattcaacgtaggtccttttctattttccctaagtgtcggccggtctgagaaataaagggaaagagtacaaaagaaagaaattttaaagctgggtgtccgggggagacatcacatgtcggcaggttccatgatgccacccaagctgcaaaaccagcaagtttttattagtgattttcaaaggggagggagtgtacaaatagggtgtgggtcacagaaatcacatgcttcacaaggcaataaaatatcagaaggcaaatgagggcagagcaccagggccaaattgaaattgctaatgaagtttcgggcacgcattgtcattgataacatcttatcaggagacagggtttgagagcagacaaccggtctgaccaaaatttattaggcaggaatttcctcgtcctaataggcctaggagcgcttcgggagaccagggcttatttcatcccttatctacaactgtataagacagacattcccagagcggccattttagagacctccccctaggaaggcattctctttctcagggttgttccttgctgagaaaaataattcagcaatatttctcctattcgcttttgtaagaagagaaatatggctctgttccgcccggctctcaggcagtcaggcctgatggttgtctcccttgttccctgaacatcgctgttatcctgttcttttttcaaggtgcccagatttcatattgtttaaacacacatgttttacgaacaatttgtgcagtgaacgcaatcatcacagggtcctgaggcgaaatacatcctcagcttacgaagatgacgggattaagagattaaagtaaagacaggcataggaaataataagagtattgatttgggaagtgataaatgtccatgaaatcttcacaatttgtgttcttctgccatggcttcagcaggtccctccgtttggggtccctgacttccctcaacactggtctcttccactgagccttggtgagcccatctaggtcctactggatgcatgtgtggggaggggggtgccctgggttgggtcaatgatgagaaccttatattgtcctgaagagaggtgatgacttaaaaatcatgcttagtaggattacgctgaggcctagcctaggtgagaatgttggaagaggatactggatgctgaggtccctggctgagctactgtattttgggatggagatctggtgactctaagggcacctgaagggccagaccctgtctctatgaggcagcccaggctccctgtgcaggcttgctgttggcactctggttccctggggtgggacatattggtggctcctccctgagccctgttctccccttgtgtctttcagtgagctcttccaccaaggagggccccctggcattgactggcataggtgagtggatcctgctggtgtcatgggccatgggccaggccacgtggggtcaccaagggtcagccttcaggaaagaagggtttcctcagggagccaaactgaatccccactgggaagagatgggttctccaggagggcggcttcctgggaaacaggaaccaaggaggacgccttccctgaagccctgcaggggtgacggtggtccaggcaggaaagggttccttcaattccacccagggcagctcccagctgagtctcggtgctcgcgtctggactgccctgactatgtggggggccacaggggctctggggtgccttgggggtcacacaggtgctctttgtccctggagaaaggtgggtgatcaggcccatggagttgagcagtggagattcaaggattgcacctgacacatggtcctgaatggaacccaccctgttgagcaatgggccatcccatgggcctcttcaagcctgaagaggggcggtgctgtttcactgggtttaggtcaaggctgagctctggccggtgcctggtggtgctgcagtctagctgttggactcgtgggctttgggccagtggggcagcctgcatccctctggaagtcaccccttccctgtggctggaagttaccccttcccagtgggcgaatgtggggaagggtcacctcctgaagtgagaaggcccactattgagggtcctgtcctggcaatttgctgcccatgctgcttctgagccatggagacacctccagtgtggtgggatcttgggcccaaggaagggagaagacactgtgccccccgattagctgagtgtggccaggctgtgtgtttatgaggtgtgaggggcatggatggaaactcaccagagaaagcatgtggccctgggaccccaggtcgtggtttccagtatgtgcccagatacagcacatgggtgggtgcccaccatgcacagggactggctatgtgactgccagctgtgcagcagcatcaggcatatgggccagcctccttggttgacaatgaactggttgctggccctggcctgtgcccagtagtcctggggtgaccctggtgtcatacaggggagctggcatgtgtagtggaggtgcttgtggggcttgcagtagggcacagccctggcttctagcctgagcccagtgacctgcctgtcctatcctttcggtgttcagtggcggagagagcattgggtgccctgcatccatgatgggtaagtattccacatggatctcatcacatgggtccatggaaggtgagcatccctgagctggcacaccacaccttctgtccacatggaggggtgaggttgtgtttgggcacttgtcctcttcctgttccttgagatggtgaccccagaggaggacatgcgttgggcccgctgtccctggccagtggccatcagccaagtgcctagcccctattgcactgaaactcgggcccttcctgtcaccttggtctcctgcgttgagcttgggtgagcccatccgggtgccactggatgcctaggcagggaggggggtgccctgggttgggtcgatgatgagaactttatattgttctgaagagaggtgatgacttaaaaatcatgctcaataggattacgctgaggcccagcctaggtgagaattttggaaggggacactagaatcccgaggtccccagcagggctgctgtattttaggctggatacctcgaggccctgaagggcacctcatggaggggcccaatcctgtctgtgctcctctattaggcacaccagactttctgtgtgggcttggtgtccacgctcagcttccctggggtgggacacgttggcggctcctccgtgagccccattatcctctgtgtctttcagtgagctcttccccccagcagacccctgggattgacgagcataggtgagtggagactgctggtgtcatgggccatgagccaagctgcgtggggtccccaagggtcagccctcgggccacctgggtttcctcaggagctgatctgaatcccaactggggatgtgttctccaggagggcagcttccttgggaatcagacataaggaggaggccttctctgaagccccgcaggggtggcagttgtccaggcaggaaagggtttcctcagccccacgcagggcagtgctcagctcagacttggtgcttgggtcaggcctctaacatggccaggccacatgaggggggcaacaagggctccggggagccaagggcatctcacgggggctctccaaccctggagaagggtgggtgattcggtccatggggtcaggccatggagattcatggattgcagcaaacccaggaccctcaatgggactgaccctataagcagtgggccctcccagtggcacctctttgagccatttgtggggcggcgctgtttctctgaggttgggtcaagactagctctggccagtgcctgatggtggtgcaatccactcctgggactcgtgggctctgggccaaggctgcagcccatgtcccgctgggggtcaccccttcattgtgggcgagtggcagtaatggcctcctgagttgggaaggcccgcagtggaaggacctttcctggaaatttgcagtccaggctgcttctcagccattaggacaactccagcgggttggggggcaggggcgggtcttaggcccaaagaaaggagaagataccatatgtctcccggttggctgagtgtggccctgctgtgtgtgtgggaggtgttgtgtggggcatggattgggacacaccagagaaagcttgtggccctggagccccaggctgcgatttccagtgcaccttgaggaaaggagggtgggtgccctccatgcacagggcagactgtgcaactgccaggtaggcaacagcacgtggtgtccgggccagggtccttggtttgctgtgagctctttggtgtccgtggcccctacccaaggatccagataccacccggggtcatgcaggggagctagcatgggcaatggaggtgctcaaggggcctgcagtagggcacagcccaggtgtcttgcctgagcccaggaacccacctgccctgtccttccatggttcagtggctgggagagcaaagggttccgctgatctatgacacatcagtgtttcccatggatcccatcacatgggtccacggagagagagcatgtgtgagctggcacccccaaccccattccctgtatggaggcgtgagcccatggttggacacatgtcctcctcctgtccccccagatggtgactgtggaagaagacttgctttgggaccgctggccccaggccagtggttgtcatccaggtgcccagcccttggtgcacttgagctcaagcccttcctggtgccctggcctcctgccctaagctgtggtgagcccatccaggtcccactggatgcatgcatggggaggagggtgccctgggttggatcgatgatgagaaccttatattgtcctgaagagaggtgatgacttaaaaatcatgctcaataggattacgctgaggcccagccttggtgagaattttggaagaggatgctgagatcccaaggtctctggcagggccactgtattttgggctggagacctggaggccctgaagggcatcttaggggtgcccgaccccatctctgcgctcctccttgaggcagcccaggctcccttgcgggcttggtgtcagccctccagttccctggggttgaggcacattggaggctccttcctgagcccccattctcccctgtgtctttcagcgagctcttctgcccagggggacccctggccttaagtgggataggtaagtggatcctgctggggtcgtggaccatgagccaggtcgctttgggtcactgagagtcacccttcaggccacgagggattcctcagggagcccatctgaaacccaccagggacggatggtttctccaggaggacagcttccttggaagtcggtcccaagaaggatgccttccctgaagccgtgcagagatgatggacgtccaagcaggaagggcttccttcaactcaatgcagtgcacatcctagctgagactcagtgcacaagtcaggcctggaggacttcccaggccacatgagggggtccacagggtctccaggggccacgggtgttatgagggtgctctctgtccccgaggcttgcagaggggcagggtgtgggtgatcggacttatggagtcaggccgtgaagattcaaggattgggcccaacccatggcccagcatgggccgaacctgtagagcaatgggccatcccggtggtgcatccttgagccttgtgggggtggtgtgaccttagtggggttgggtcaagcctgagctctggccttcacctggtggtgctgcaggctggccctgggaatttgggctttgggccaagggtgcagtctgtgtcccgctaaaggtcacccctccccaaagtggagtggccagaaggatggcatcctgtggtagaagtcccactgtcaagggtcctgtcctggcaatttgttgcccaggctgcttctaagccatgggttcacctccaaagtggcggggtcttgagccgaaggaaaggggaagacatcatgtgttccctgattgactgagcatggcctggctctgcatttggaggtgtgcggtgcacgaatggggacccatcagagaaggcatgtggccctggggctccaggatttgatttctggtgtgagcttttacagggggtctgtagtggcacgtagcattcaggtcagcctacttggtttgctctgagcttgttggtggtcctggccctgcccagtggtcccattgtggcatagagtcatgtgagggagctgtggcaaggagggccaagggttccccacattcatgatcgttactgtttacatggatcccatctcttgagtccatggagggacagcatgtgtgagccagcaccccctgcccactttcctgcatggaggcgtgaggccgtatttctatacgtgtcccccacccctccagatggtgaccccagaggaagacgtgcattgggtccgctggccccaggccagtgtctctcagccatgtgctcaacacctggtgagctgaagctcaggcccttcctggcatcctggtctcctgcactgagctgtggtgagcacatctgggttcctctggatacgtgtgcagggagggggatgcactgggtcgggtcaatgatgagaaccttatattgttctgaagagaggtgatgacttaaaaatcatgctcaataggattacgctgaggcccagcctaggtgagaattttggaagaggatgctgggatcccaagttccccagcatggccagtatattttaggcaggagaccctgaggctctgaacggcatctccggggggcacaaccctggctctgggctcctctgggaggcagcccaggttccctgtgcaggcttgggctctggttccctgagcccccattctccctcgtgtgtttcagtgagctcgtcctcctaggtggggcccccaggcattgaccggcataggtgagtggtcctgctggggtcatgggtcatcagcaggttggagtcaccaagggtcagcctttgagacaggagggtttccacaggcagccgacctgaatccacaccatggagggatagattggtcctccaagagggctgttttttttcggaatcagacccaaggaggataccttccctgcagccctgcggggatgacggtggtccaggcagggaagggttccttcagtctcacgcaggtcagctcccagctgagtctcagtgcattggtctggcctccaggactgaccaggccacgtgaggggggcaacaggggcttcgggatgcagtggggtcacacaggatctctccatccccagagaaaggtgggcatagaacccatggattcgagctgcagagattcaagaatcgcacacgaattattgccctgaatgggacccaccctgttgagcaatgtcccatcccagggcacctctttgagcctgaagggggtggtgctgtttccctaggtttgggtcaaggctgagctctggccagtgcctggtggtgctgtagtcctgtcatggactcgttagctttacgccaaggggtcagcccacgtcctactggggatctccccttccctgtggctggaagtcaccccttccccattggcaagtgtcaggaagggtgacctcctgaggtggaagtcctgttgagggtcttgtccctggaatatgccacgcatgctgcttctgagccatggggtcacctccagggtagcgggtcttgggcccaaggaaaggagaagtcaccatgtgtcccccgattagccaagtgcggccctgctctgtgtttaggaggtgtgtggggcatggatggggacccaccagagaaagcatgtggcccagggaccccaggttgcaatttctaggacatgctgggatagggcacctgtgtgggtgtccacagtgcacagggataggctatgtgacttgcaggtctgcagcggcatctggcatccaggccagcctccttggtgggccgtgaactgaatggtggcgctggcctgtgcccagtatatctggtatgaccctggggtcgtgtgggggagccggcatgggcagtggaggtgcttatgggacctgcagtaggacacagtcggggcttcttgcccaagcccagtgacccgcttgccctgtccttccagggttcggtggctgagagagcttttgttgccctgtgtccgtgacgggccagtgttctgcatgcatcccatcacatggatccatggagggtgagcatccctgggctgacacaccccaccttctgcccccatggaggggtgaggttgtgttttcacacctgtcttactcctgtttccccagatgttgagcccagaggaagacttgcactgggcccaatggccccaggtcagcgtccatcagccaggtgtccagcccctggtgcactgaagatcgggcccttcctggtgccctggtctcctgcattgagctgtggtgagcacatccggatcctgctggatgcgtgtgcggggaagggggtgccctgggttgggtcaatgagaaccttatattgtcctgaagagaggtgataacttaaaaatcatgctcaataataggattacgctgaggcccagtctaggtgagaggtttggaagaggatgctgggattccgaggtccccaggagggcccctgtatttttggctggagacctggaggccctgaagggcatcttgtgggtgcccaaccctgtctctgcgctcctccttgaggcagcccaggctccctgtgcaggcttggtgtcagccctccagttccctgggtttgaggcacatgggaagctcctttctgagccccgttctcctcttgtgtctttcagtgagctcttccacatggaagacccctgtcattgactggcataggtgagtggctggcatcatgggccatgagccaggccgcgtgaggtcgccaagggtcagccttcgggaaagaagggtttcctcagggagccaacctgaatccccactgggaagatatgggttctccaggagggcgacttcctgggaaacaagaaccaaggaggtccccttccctgaagccctgcaggggtgacggtggtccaggcaggaaagggttccttcagttccacccagggcagctcccagctgaggctcggtgcttgcgtctggacttaaggactgccctggccatatgaggggtgccacagtggctctggggtgccatggggtcacacaggcactctctgtccctggagaaaggtgggtgattgggcccatggagttgagctgttgagatgcaagttttgcacctgacacatggccctgaatgggacccaccctgttgagcaatgggccatcccatgggcctcttcgagcctgaaggggggcggtgctgtttcactgggtttaggtcaaagctgacctctggccgccacctggtggtgctgcagtccagcccttggactcgtgggctttgggccaagggggcagcctgcatcccactgaaagtcaccccttccctgtggctggaagttatcccttcctcatgggcgagtgttgggaagggtggcctcctgaagtgggaaggcccgctattgagggtctgctcctggcaatttgctgcccatgctgcttctgagccatggagtcaccaccagtgtggtggggtcttggacccgaagaaaggagaagacactgtgccccccgattagctgagtgtggccaggctgtgtgtttgcgaggtgtgaagggcatggatggagactcaccagagaaagcatgtggccctggggccccaggttgtggtttccagtatgtgcttggatatggcatatgggtgggtgcctaccatgcacagggactggctatgtgactgccagctgtgcagcagcatcaggcatacgggccagcctccttggttgaccatgaactggttgctggccctggcctgtgcccagtagtcctggggtgaccctggtgtcatgtaggggagctggcatgtgtagtggaggtgctcgtgtggtctgcagtagggagcagccctggcttctagcctgagcccagtgacctgcctgtcctgtcctttcagggttcagtggcggagagagcatcaggtggcccacgtctgtgatgggccagtattccacatggatctcatcacatgggtccatggaaggcgagcatccctgagctggcacaccccaccttctgccagcatggaagggtgaggttgcatttggcacctgtcctcttcctgttcctcgagatggtgaccccagaggaggacttgcattgggcccactgtccccgggccagtggccatcagccgggtgcctagcccctgttgcactgaagctcaggcccttcctgttgccctggtctcctgcattgagcttgggtgagcccatccggttgccactggatgcctaagcagggaggggggttccctgggttgggtcaatgatgagaaccttacattgttctgaagagagatgatgacttaaaaatcatgctcaataggattacgctgaggcccagcctaggtgagaattttggaagaggacgctgggatccctaggtccctgacagggccactgtattttgggctggagacctggagtccttgaagggcatctggagggggcccaaacctgtctctacgttcctccatgaggcagtccaggctccctgtgcgagcttcgtgtcggtgctcagattccccttggtggtgcatgtgggtggctcatccctgagcccctgttctccccttgtgtctttcagtgaactcgtttgcccaggaggacccctggccttgagcagcataggtcagtggatcctactggggtcatgggccatggaccaggccacgtggggtcactgagggtcagctatcaggacaggagggattcctcagggagacaacctgaatccccactggtgagggattggttctccagaagggccgcctccttgggaatctgacccaaggaggacaccttccctgaagtgctacaggagtgacattggtccaggcaggaaagggttccattagtcccatgcaggtcagctcccagctgagacttggtgctagggtctggccttgaggactgcccaagccacatgaaggtggccccaggctgtgatttttggtgcgtgcttggagagggagtctgggcaccctccctgcacaggggcaggctgtgcgtctgccaggtctacagtggcgcctagcttcagagcaagcttccttggttggccttagctggttggtggccctggctcctacccaggggtcacaatgcagcccaggaagtgcagggaagccggcttggacagtggaggtgctccaggggcctgcggtagggcacagcctcggcatcttgcctgagcctagttactcgcctgtcctgtccttccagggtttggtggtggggagatacaagggttccccaggtccataactgtcctcgtttcacatggatcccatcacatgagtccacggatgtagagcatgtgtagccagcagcccctccccgctttcctgcatggaatcttaaggccctatttggacacctttccccgtccctccagatggtgagcacagaggaagaattgcgttaggccctttggccccggaccagtgtctgccagccacgtgctcagcctcccgtgcgctaaagctcaggtccttcctgtcatcctggtatcctgcactgaggtgtggtgagtccatccaggtccctctggatgtgtgagtggggatgggggtgtcctgggttgggtcgatgatgagaaccttatattgtcctgaagagaggtgatgacttaaaaatcatgctcaataggattacgctgaggcccaacttaggtgagaattttgaaagaggatgctgggaatcacaaggtccccggcaggaccactgtattttaggcgggagacctcgaggccctgaagggcatatcatggaggggtacccaacccagtctgtgctcctccattaggcacaccaggcttcctgtgtgggcttggtgtctgcactcagcttccccgggggtgggacacattggtggctccttcctgagtcgcattctcctctgtgtctttcagtgagctcttccccccagcaggccccctgggattgactggcaaaggtgagtggatactgctcgtgtcatgggctgtgagccaagctgcgtggggtccccaagggtcagccctcgggtcacctgggtttcctcaggagctgatctgaatcctgactggggatgtgttctccaggagggcagcttccttgggaatctgacacaaggaggaggccttctctggagccctgcaggggtggtggtggtccaggcaggaaagggtttcctcagctccacacaggacagtggagctgggcagtgctcagctcagacttggtgctcaggtcaggcctctaggatggccaggccacatgacgggggccacaagggctccagggcaccacagacatctcatgggggctctccaaccctggagaagggtgggcaatttggcccattgggtcgggtcatggagcttcaaggattgcaccaaacccatatccctcaatgggaccgaccctattaagcaatgggccatcccagtggcacctctttgagccatgtggtgggtggcgctgtttctctgaggttgggtcaagactagctccggccagtgcctgatggtggtgcagtccagtcctgggactcgtgggctttgggccaagggtgcagcccgtgtcctactggggatcaccccttccttatgagggagtggtgggaagggtatcctcctgaggtaggaaggcccgctgtggaaggaactttcctggaaatttgcagtccagactgcttctgagccatgaggtcatctccggggtggcggggtcttgggcccaaggaaaggagaagacaccatatgtctcccgattggttgagtatggctccactctgtgtgtgggaggtgttgtgtggggcatggattgggacccaccagagaaagctcgtggcactggaaccccaagctgcaatttccagtgcaccttgggaaggggactgggtgctcaccctccatgcacagggcaggctgtgcagctgccaagttggcagtggtgcgtggcatccgggccagcgtccttggttcgctgtgagctggttggtgtccttgacgcctgcccaggggtcccagtgctgcttggggtcatgaggggagccagcgtgggcaagggaggcctgcagtagggcacagcccgggggtcttgcctgagcccaggatcctgccggccctgtccttccatggttcggtggctgggagggcaaagggtcccccacgtctgagacacatcagtgtttcacatggatctcatcacatgggtccatagagagagagcaagcgtgagctgacaccccccacccccttccctgtatagaggtctgagcccctggttggacacatgtcttcctcctgtccccccagatggtgtctgtggaggaagacttgccattgggttgctggccccaggccagtggttgtcatccaggtgcccagccttggtgcactgaagctcaggcccttcctggtgctctggtctcctgcactgagctgtggtgagcacatccgggtcccactggatgggtgtgtgtggtggggggtgccctgggttgggtcgatgatgagaaccttatattgtctgaagagaggtgatgacttaaaaatcatgctcaataggattacgctgaggcccagcctaggtgagaattttggaagaggatgctgggaattacaagttccctgtgaagtccactgtattttgagctagagacctggaggctctgagggcatctggagggtgcccaaccctgtctctgcactcctccatgaggcagcccaggctcactctgtgggcttggtgtcggcgctcctgttacccaagggtggggtactttggcatctcctccctgagcccccattctcccctgtgtctttcagtgacctcttttgcccggcagaccccctggcattgaccagcataggtgagtggatcctgctggggtcatgggtcatgagccaggctgtgtggggttgccgagcatcagcctttggctgcaagggtttcctcaggaactgacccgaatgcccacctgggatgggttctccaggagggcagcttccttaggaatcggacccaaggaggataccttccatgaagccctgcaggggttgtggtggtccaggcagtaaagggtttcctcagccccatgcagggcagcacccagctgaaactcggtgcttaagtcaggcctctaggatggcccgtccacatgaggggaaccacaagggcactggggcgccaagggggtcttatgggggctctccgaccttggagaggtatgtgtgattcggcccatgaggtcaggttttggattttcaaggatctctccaaacccatggccctgaatgggaccgaccctattaagctatgggccatcccagtggtgcctctttgagccaagtgtggggtggcactgtttccatgaggttgggtcaagactagctctggtgaccccatgatggtgctgcagtctggccctgggactcgtgggctttgggccaagggtatagcccatgtcccaccaggggccacaccttccttgtgggcaagtggcggacagggtgtcctcctgaggtgagaaggcctgctgtggaaggacctgtccaggctgcttccaagctatggggtcacctacagggtggtggggtcaaggaaaggagaagacaccatgtgtctcccgattggctgagtgtggccccactctgtgtgtgggaggtgttgtgtgaggcatggatggggacatatcagagaacacacgaggccctgggtccccaggctgcaatttccggtgtggtgtggagcagggcctgggtgcttgccctccacacacaggggcaggctgtgctactgccagattggcagcagtacgtggcatccaggccagcctccttggttggccgtgagacggtaggtggccctggctgacacccaggggccagtacagccctggggtcatgtgaggcaactggagtgggtagtggaggtgctcaaggtgcctgcagtagggcatagccagggcgtcttgcctgagcccagtgacctacctgccctgtccttccagggttcagtggtgcagagggccaaagttcccctgtgtccatgacacatcagtgtttcacatggatcccatcacatgggtccatggtgggagagcaatcgtgagctagcatcccccacccccttcctgcatggaggcgtgaggttccatttggacacatgtccacctcctgtcccccagatagtgagactggaagaaaactttcattgggcccgctgtcccggggtgagtggtcatcagtcaggtgcccagcccttggtgtggtgaagctcaggctcttcctggcgccctggtctcctgcacggagctgcggtgagcacatccgggtcccgatggatgcatgcgtggggatggagggcgtgccctgagttgggtcaatgatgagaaccttatattgtcctgaagagaggtgatgacttaaaaatcatgctcaataggattacgctgaggcccagcttaggtgagaattctggaagaggatgctgagatccgaagtcccctggaagggccactgtattttgggctggagtccttgaggccctgaaggacaccttcggggtgcccaacccagtctctgcactcctctgtgtggcagccaaggctccttgtgcaggcttggtgttggcattctggttccctgggggtggagcacatcgacggctcctccctgagcccccgttcttctctgtgtctttcagtgagctcttctacccaggcgggcccctgcccttgagcggcataggtgagtggatcttgctggggtcacgggccaagagccaggccacggggggtcgctgagggtcacctttcaggccacgagggtttccttagggagctgacctgaatccccaccagagatggatggtttctccggaagggcagcttccttgttaattgatcccaagaaggacgccttccctgaaaccctgcaggggtaatggaggcccaggcagcagagagttccttcaacccaatacagtgcagcagcttgttgccttgatgctccccctccctggagaaaggtgggcatagggcccgtggagttgagttgcagagatttaaggatcgcacaggacttattgacctaaatgggactgaccctgttgagcaacgtgcacttggtgcatgggtcaggtgtggagcactgcccaggccacatgaggggtccactgggtctctgggggccacgggtgttatgcaggagctctccgtccccaaggcttgcaggggggtaggatgtcggtgatcgagcttatgcagtcaggccgtgaagattcaaggattgggcccaacccatggccctgatgggaccgaccctgttgagcaatgggctatcccactggtgcctccttgagcctggtgggggcagtgcggcctcagtgggcttggatcaaggctgagctctggccagcacctggtgtttggccctgggaatcgtgggctttgggccaagggttcagcctgtgtcccactggagttcatccctaccggaagtggagtggatggaagggtggcatcctgtggtggaagacccaccgttaagggtcctgtcctggcaatttgatgcccaggctacttctgagccatggagtcacctccagggtagcagggtcttgagccaaaggaaagttgaggacatcatgtgtcctctgattggccgagcgtggcccagctctgtgtttaggaggtgtgcggtgcatgaatggggacccaccagagaaggcatgtggccctggggccccaggatgtgatttctggtgtgtgcttataaagggtgcctggatgggttcatttaatgcccaggggcaggccatgtgactgccaggtctgcagtggtacgtggcatccaggccagcctccttgatttgctgtgagctatttggtgcccatggccctgcccagtggtcctgatgcagcccagattcgagcaggggatttggcgtgggcagtggaggtgctccagggtcctgcactagggtgcagcctgggcgttttgctcgaaccctgtgaccctcctgccccgtccttccagggttcagtggccaagggttcctcgcgtaaatgaccatcactgttttacatggatctcatctcatgagtccatggagggagagcatgtgtgagccagcaccccctgcccactttcctgcatggaggcatgaggccttgtttggacacctgtcccccacccttccagatggtgaccccagaggaagacttgcgttgggcccactggctctgggctcagcccctggtgagctgaagctcaggcccttcctggcaccctggtctgctgcactgagctgcggtgagcctatctgggtcccactggatgcatgggttgcggggcagtggagggtgatgccctgggttgggtcgatgatgagaaccttatattgtcctgaagagaggtgatgacttaaaaatcatgctcaataggattacgctgaggcccagcctaggtgagaattttggaagaaggtgctgggatccggagttccctggaatgaccaatgtattttgggctggagaccttgaggccctgaacagcagcatctcgtgggggcccaaccccttctccgtgctcctctgtgaggcagcccaggctccctgtgtgggcttggtgttagtgctccggttctgtgaacccccattctccccttgtgtctttcagtgagctcttccacccaggtgcaaccccctggcattgaccagcataggtgagtggtcccgctggggtcatgggtcatcagtcatgcagtgtggggtcaccaagagtcagcctttgagacaggagggtttccacaggcagctgacctgaatccacaccatggaagggtaggttggtcctccaagagggctgtttttttgggaatcggacccaaggatgatatctttcctgcagccctgcagtgatgacggtggtccaggcaggaaaagtttccttcaatctcatgcagggcagctcccagctgagtctcagtgcactggtctggcctcgaggactgaccaggccacgtgaggggggccacaggggctttgggatgccatggggtcacacaagagctccccatccctggagaaaggtgggcatagagcccatggagttgagctgcagatatttaaggatcacacaggatttatagccctgaatgggaccgaccctgttgagcaatgtgccatccatcctatggtacctctttgggcctggatggggtgttgctgtttccctaggttttggtcaaggctgagctctggccagtgcctggtggtgctacagtccagccacggacttgttagctttaggccaagggatcagtccacgtcctgctggggatctccccttccctgtggctggaagtcaccccttccccattggcaagtgtgaggaagggtggcctcctgaggtggaaggcctgctgttgagggtcttgtccctggaatatgccacccacactgcttctgagccatagggtcacctccaggatagtgggtattgggccaaaggaaagaagtcaccatgtgtcccctgattagccaagtgtggccctgctctgtgtttaggaggtgtgtggggcatggatggggacccaccagagaaagcatgtggccctgggactccaggttgtgatttccagttcatgctgggatagggcacctggatgggtgcccacaatgcaccggggcaggctatgtgactgccagctttgcagcggcatctggcatccgggccagcctccttggttggccatgaactggttggtggccctggcctgtgcccagtagctctgtcgtaatcctggggtcatgcgagggagccggcatgggcagtggaggtgctcgtgggacctgcggtaggacacagccaggtcttcttgcccgagcccagtgacccacctgccctgtccttccagggttcagtggttgagagtacagggtgacttgtgtctgtgacaagccagtgttctgcatggatcccatcacgtggatccatggacggcaagcatccctgagccgccacaccccaccttctgcctccatggaggggtgaggttgtgtgtggacgcctgtcctactcctgtttccccaggtattgagcctggaggaagacttgaattggtcccaatggtcccaggccagcatccatcagctaggtgctgagcccctggtgcactgaagattgggcacttcctggcaccctggtgtgctgcaccgagctgtgatgagcacatccgggtcctgctggatgcatgcgccgggaaggacgtgccctgagttgggtcgatgatgagaaccttatattatcctgaagagaggtgatgacttaaaaatcatgctcaataggattacgctgaggcccagtctaggtgagagttttggaagaggatgctgggatcctgaggtcccctggtagagccaattgtattttgggctggagacctggaagccctgaagggcatctgggaggcccaaccctgtctctgtgctcctccatgaggcagccctggctccccatgtaggcttggtgatggccttcctgttccctgggggtggggcacatgggtagctcctccctgacccccattctctcctgtgtctttcagtgagctcttccccacaggtgggccccctggcattgactagcatcggtgagtggatcctgctggggtcgtgggccgtgcaccaggctgcatggggtcaccaagtattagccttcaggacaggagggtttcctcagggagtcgaccttaatcctcacctgtggagagatgggtttgtcctctaggagggcagcttcctgggaaatcagacccaagacgatgccttccctgaagccctgcaggggtgacggtggtccagtctggaaagggttccttcagtctcatgcagggcagctcccagctgacacttggtgtgagagtctgtccttgaggactgcccaggacaaatgagtgggacaacagaggctcccggataccacagggatcactcaggggctctccgtccctggaaatgggtgggcgatcgggcccatggggtggggctgcggagattcaaggatcgtgccctgctcatggccctgaatgcaaatgaccctgttgagcaatgggtcacaccagtagctcctttttgagcctggtgggtggcggctcagcttcaactggttgggtcaaggctgagccatgactggtgctttgtggtgccgcaggccaaccctgggactcatgggctttgggtcaagggtgcagcccgcctgctgctgggggtcaccccttcttcgaggtcagtggcgggaagggtcacgtcccgaggttggaaagccccctcatgagggacctgtcctgggaatttgttgcccaggctgcttctgagccatgtggtcacttccgggtggcggggtcttgggcccaaggaaaggagagggcaccatgtggctcctgattggctcagtgtggcccagctctgtgtttgacaggggtctggggtgtggatgaggacccaccagacaaagcacgtggccctgggcccaggctgtgatttctggtgcgtgcttggagaaggatcctgggcaggcattctctccaaacaggggcaggttgtgggactgccagattggcagcagtgcctggcatccaggccagcatccttggttggctgtgagctggttggtgaccttggaccctgcccagggtttccgttgtggtccagagtcatgcagtggggccagtgtgagcagtggaggtgctccaggggcctgctgtatggcacagccagggcatcttacccaagccctcctgcactggtctcctgcactgagctgtggtgagcccatctgggttcctgtgatgcctgtgcggggagggggttgccctgggttgggtcgatgatgagaaacttatattgtctgaagagaggtgatgacttaaaaatcatgctcaataggattacgctgaggcccagcctaggtgagaattttggaagaggatgctgggaattatgagttccctggcagaaccactgtattttgggctggagacctggaggctctgagggcatctggagggtgcccaaccctgtctctgcgctcctccgtgaggcagcccaggctcactatgtgggcttggtgttggcactcctgttacccgggggtggggcattttggcatctcctttctgagcccccaatctcccctgtgtctttcagtgagctcttctgcccagcagcctccctggcagtgaccagcataggtgagtggatcctgctggggtaatggcccatgagccaggctgtgtggggtcaccaagcatcagccttcagccataagagtttcctcaggagctgacccgaatgcccacctgggatgggttctccagaagagtggcttccttggaaatcatacccaaggaagataccttccctgaagccctgcaggggttgcagtggtccaggcagtaaagggttttctcaacctcatgcagggcagtgccccactaagactcagtgctctggtcaggcctttaggatggccaggccacatgagaggggccacaagggctctggggcaccaaggggttcttgcaggggctcttcaaccttggagaggtgtgtgtaattcagcccatgaggtcaggctgtggattttcaaggattgcaccaaacccatggccctgaatgggacaaaccctaataagttatgggccatcccagtggtgcctctttgagccaagtgtggggtggcactgtttcctaagggtgagtcaagactagctctggctggcacctgatggtggtgcaatcctgccctgggattggtgggctttgggacatgggtacagcccatgtcccattggggtcaccccttcattgtggacaggtggcgggaagcatgtcctcctgaggtgggaaggcctgctgtggaagaccctgtctcagaaatttgctgtcttggctgcttctgagctatggcgtcacctctgtggtggcgggagtctcgggtgaatggatcctgctggggtcatgggccatgagccaggccggggtggggtccctgagcgtcacctttcgggtcatgagggtttcctaagggagccgacctgaatccccaccagggatgaatggtttctctgggaagcaggtttccttggaaatcagtcccaagaaggacaccttccctgaaaccttgcaggggtaacagaggtccaggcaagagagggttctttcaacccaacgcagtgcagatcctagctgagacttggtgcacaggtgagtcctggaggactgcccaggccacatgagggcatccacagggtctccgtggccaggagtcttatacgggagccctctgtccccgaggcttgcagaggggttgggtgtgggtgatctggcttacggagtcaggccgtgaacattcaagggtcgggaaccacccatggccctgaatgggaccgaccctgttgagcaatggccatcctggtggtggcaccttgagcctggtgggggtggcgctgcctcagtggggttgggtcaaggctgagctctgcctgtcaccttgtggttggccctgggaatcatgggctttgggccaagggtgcagcctgcgtcccgcttgaggtcactcctacctgaagtggagtggccggaagggtggcatcctgtggtgggagacccacggtcaaggatcctgtgctggcaatttgctgcgcagcctggttctgagtcatggggtcacctccagggtgacagggtctttgtcaaagggaaggagaggacattatgtggcccctgattggccaagcatggcccagctctgtgtttgggaggtatgcggtgcctgaatggggacccaccagagaaggcacatggccctggggccccaggatggtatttctggtgtgagcttataaagggtgcatggatgggtgcattccatgcccagtggcgggttatgtgactgccaggtctgcagtggcacatggggtccgggccagcctccttggtttgccatgagctggttggtggcccaggccctgcctagtggtctcattgcagcccagagtcatgtgggggagctggcgtgggcagtcgaggtgctccagggtcctacagtagggtgcagcctgggcgtcttgctggaatcccatgacccacctgccctatccttccagggttgagtggcagggagggccaagggttcctcgtgtgcatgactgtcactgttttacatggatctcatctcatgagtccatggtgggagagcatgtgtgagccagcacaccctacccactttgccctatggaggcacaaggccctgtttggacacctgtcccccacccctccagatgctgaccctggaggaagaattgcactgggcccactggccccgggaaaatgtccctcagccaggtgcttagcccctggtaatctgaagctcaggcccttcctgatgccctggtctcctgcactgagctgtggtgagcacatctgggtcccaatggatgcatgcatgcgttgtggggtggtggtgtcctgggttgggtcgatgatgagaaccttatatgttctgaagagaggtgatgacttaaaaatcatgctcaataggattacgctgaggcccagcctaggtgagaattttggaagaggatgctgggatttctaggtccctgtcatgggcactgtattttggactggagacctccgggccctgaacagcatctcgggggggactctaccctgtctccacattacatgtgaggcagcccaggctccctttgtgggcttggtgtctgcactctggttccctgtggtagggcagcttgctgggtccttcctgagcccctgttctccctttgtgtcttctgtctttcagtgagctcttcagcccaggtgggctccctgacactgatgcgcataggtgagtggattctgctggcatcatgggccatgagccaagctgcgtagggtcaccaaaggtcactctttaggccacgtgggtttcctcagggagccgacctgaatccccaccaggttgggacagtttctccaggaggctggcttccttgggaatcagacccaagacaatgccttccctgaagccttacaggggtaacagttgtccagacaggaaagggtcccctcagtcccattgaaggcagctcccagctgagactcagtgtgcgagtctggcctcaaggatggcccaggccacatgaaggaggccacaggggctctggggtgccacaggggtcacacgagagctctctttccctggagtggggtgctcgaatgagcccatggggtcaggctgcagagattcaaggatcgcatcccaaccgtggccctaaatgcgaccgaccatgttgagtaatgggccatctcagtggggcctctttgagcctggtggggggcggggctgtttccctgggtttgggtcaaggctgagctctggccagcgcctggtgatgctgcaggccagcccaggttcttgtgggcgttggtccattcggcagccctgtcctcctggaggtcaccccttgcctattggtgattggctggatcctgaggtggaaagacctgctgttgatggtcctgtcccaggaatttaccacccaggctgcttctgagccatggggtcacctccagggtggcggagtcttggggctaagaaaaaagaggacactatgtagcccacggttggccaagggtggcctgactctgtgtttgggacatgtgcggggcatggatagggacccgccagagaaagcacgtggcccggggactccaggcttcgatttcaggtgtggcttgcaaatagcacctaggcaggtgcccaccacgccctggggcaggctatgcaacttccatctccacagtggcgcatggcttctgggccattctccttggttggccatgagctgattggttcccctggcctgtgccctgtggtcccggagtggctctgggatcgtgtggggcagccagcatggacagtggagatgctatcaaggccttcagtagggtgcagcccaggtttcttgcctgaacccagtgacccacctaccctgtgttttcagggtttgctgacagggaaggccaaacgtgccccacgtccatgctaggtcagtgttcctcatggaccccatcacatgggtatcccttaccccttccccacatggaagtatgaggctctgtttggacacatgtcctcttcctgtccccccagatggtgagcctggaggaagacttgcattgggcccaatggacccaggccagtggccatcagccaggtgcccaccctggtgtgctgaagcgcgggacctacctgttgtcctggtttcctacactgagctgaggtgagcacatctgggtccctctggatgcatgcatggggcggggggtgccctggtttgggtcaatgatgagaaccttatattatcctgaagagaggtgatgacttaaaaatcatgctcaataggattacgctgaggcccagcctaggtgagaatttggaagaggatgctgggatcccaaagtcccagtaggggactttatttatttattttgggctggagccctggaggccctgaagggcatctggggggcccagccctgtctctgtgctcctccgtgaggcagcccagcctccctgtgtgggcttgctgttggtggtccagttccttggggcggggcacgtggacagctcctccttgagcccccctgctccacttgtgtctttcagtgagctcttcaacccaggcggggcaccctggcattcaccagcataggtgagtggatcctgctgccatcgtgggccatgggccaggctgggtagagtcactgagggtcagccttcgggacaggagagtttcctcagggagcgaacctgaatccccaccagggagggataggttggtcctccagaagggtggcttcctgagaaatcggacccaagggggacgccttccctggagccctgcagtgatgacggtggtccaggcaggagagggttccttcagtctcacacatagtagctcccagctgagtctaggtgttcgagtctggccttgaggactgcccaggccacctgaggggccaacagggactctgggacaccatgggggtcacataggagctctccattcatggagaaagatggatgatagggcccatggagtcgagctgtggagatttaaggattgcgcccaatgtatggccctgaatgggacagaccctgttgagtaatgagccattctatgggcctcatcgagccttgagcggggcggtgctgtttccctatgtttgagtcaaggctggactctggccggtgcctggtggtgctgaggtctggccatggactcgttggctttgggccaaggggtcagcctgctccccctggaagtccccccttccccgtggctggaagtcatcccttcccaaggggcaagtgtcgggaatggttgcctcctgaggttgcaaggcctgctatctagggtcttgtctttggaatatgctgcccatgctgcttctgagtcatggggtcacctccagggtagcggatcttgggcccagggacagaagatgccgtgtgtcccctgattagctgattgtagccctgctctgtgttcaggaggtgtgtggggcatggatgcagacccaccagagaaaactgtggcccttagaccccaggttgcaatttccattatgtgctgggatagggcatctgggtgggcacccactatgcacagagataggctatgtgactgccagggctgtagcggcatctgacatctaggccagcttccttggtttcctgcgaatgagttggtggccctggcctgtgcctagtagttctggggtgaccccgggtcgtgtgggggagccagcaggggcccagtgaccagcctgccctgtccttccagagttctgtggctaagagagcactgggtaccctgtgtccgtgatgggccagtgttccgcatgcaaacgatcacatgggtccatggagggcaagcatacttgaactgccacaccccaccttctgctcacatacaggagtgaggttgtgtttggacagctgtcctactcctgttcccctagactgtgaaatgggaggaagaattgtgttgggcccaatggccctgggccagtatccgtcagcctggtgtccagcccctggtgtgctgaagctcatgcccttcctggtgccctagtttcctgcactgagcttggtgagcccatttgggtactgctggatgcatgggtggggagggaggtgccctgggttgggtcgatgatgagaaccttatattgtcctgaagagaggtgatgacttaaaaatcattctcaaaaggattatgctgaggcccaccctaggtgacaattttggaagaggacactggaaatcaatgaggtccctggcagggccactataatttggggtggagacctggaagccctgcagggcacctcgtgggggcccaaccctgtctcttcactcccctgtgaggcagcccaagctccctctgtaggcttggtgtcggcactctgctttcctggaggcggggcattttggctgctccttcctgagcccctgttctcccctgtgtctttcagtgagctcttttgcccagaagactccctggcattgatcggcataggtgagtgtctcctgcttgggtcatgggccatgagccagaccatagggttgccgagggtcagcatttgagccatgagggtttcctcaggaggcgacctgaatccccacctgggatgggttctccaggagggcagcttccttgtgaatctgagccaagtaagatgccttctctgaagccctgcaggggtgccagttgtgcaggcaagaaagggttccctcagccccaggcagggcagcgcccagcagagactcggtggttgggttaggcctctaggatgaccaggccacatgaggggggccacaagggctctggggcacaacaggggcttcgcagggtctctgcgaccccaaagagtggtgggcgattcggcccatgggatcgggccccagattcaaagatcacaccacacccatggccctgaatggaaccgaccctgttaagcattggggcatcccaggggtgccactttgaacctggtgtggggtgccgctgtttgcctgaggttgggtcgagactagctccggccagcacctgatggtggtgcagtccggccctgagattagtgggctgtgggcccagggtgcagcctgtgtcccgctgggggtcacctcttccttgtgggcgagtggtggaagggcatcctcctgaagtgggaaggcccgctgtggaaggaactgtcctggaaatttgccatccaggctgcttctgagccatggggtcgcctccagagtggcagggtcttgggcccaaggaaaggagaggacactgtgtttccctcaattagctgagtgtggccctgctctctgtgtgggaggtgttgtgtggggcatggatagggacccaccagagacaacacatggccctcgggccccaggctgcaatttctcagtgcatgcttggagacggtcctgggcctcctccatgcccagggtcaggctgtgcaactgtcaggttagcggcggcatgtggtgtctgggcctgtctacttcgttgtccgtgagctgctggtggccctagccctttcccaggggttcaggtgcagccctggggttgtgtgggacagccagtgtgggcagtggagctgctctggaggcctgctttagggtgcagcctgggtgtcttgcccgagtgtagtgacccgcctgccgtgtcctcacggggttccctagcaggaagggccaagggtcccctgtgtctgtgacacgtgagtgtttcccatgggtcccatcaaatgggtccacggagggagagcatgagtgaactggtaccccccacccccaccctcttccccacctggaggcatgagcccctggttggacatatgtcctcctcctgtacccccagatggcagcgctggaggaggacttgtactggggccgctggccccacatcagtgtccgtcatcccggcgtccagcccctggtgtgctgaagctcaggcccttccttgtgccctagtctcctgcactgagcttggtgagcccattcggatactgctggatgcatgggtcgggagggaggtgccctgggttgggtcgatgatgagaaccttatattgtcctgaagagaggtgatgacttaaaaatcattctcaaaaggattatgctgaggcccggcctaggttagaattttggaagaggatgctgggatcctgaggtccccaggagagcccctttatttttggctggagacctggaggccctgaagggtatctggggggcccagccctgtccctatactcctctgtgaggcagcccaggctctctgtgtgggcttggtgttggcactctggttttctgggggcggttcaggttgctggttccttctgaaccattgttctccccttgattctttcagtgagctcttctgctcaggcgggtcccctggcattgaccagcataggtaagtggatcctgctgggttcatgggccatgagccagaccacatggagtgactgagggtcagccttcaggacaggaagatttcctcggggagccaacctgaatccccaccgtggagggatgtgttagtcctccaggagggtggcttcctagggaatctgaccccaggaggacacctttgctgaagccctgcaggggtgatggtggtccaggctggaaagttttccttcagtctcatgtggggcagctccctgctgacattccgtgcctgcgtctgaccttgaggactgcccgggccacatgagtggggcaacaagggctccagggtgccacggggattatgagtggggctctccatccccggagagaggtgggcaatcaggcccatgtggtcaggcttgtagggttcggtggtggggagagccaaggtttccctgggtccattaccgtcactgtttcacctggatcccatcacatgggtccatggagggagagcatgtgtgaacaggcaccccttgctccctttcccacatgagcccctggttggacatatgtcctcctcctgtccccccagatggtggccctggaggaggacttgtattggggccactggccccacgtcagtgttcgtcagcctggcatccagcccctggtgtgctgaagctcaggcccttcctgttgccctagtctcctgcactgagcttggtgagtccattcggggactgctggatgcatgggcgggtagggaggtgccctgggttgggtcgatgatgagaaccttatattgtcctgaagagaggtgatgacttaaaaatcattctcaaaaggattatgctgaggcccggcctaggttagaattttggaagaggattctcggatcctgagatccccagccaggccactgaatttttggctggagtccttgaggccctgaagggtgtctgagggctgctgaaacctgtctctgtgcttgtccgtgaggcaacccacattcgctgtgtggacttggtgttggccttcccgttctccggggatgggacatactgtcagcttgtccctgagtacccgttctcccctgtgtctttcagtgagctcttctgcccaggtggtccccctggtcttgatgggcataggtgagtacatcctgctggtgtcctggtccatgagccagggtgcgtacggttgccggaggtcacctttaggccatgtgggtttcctcagggagctgacctgaatccccactgggagggatggtttctccaggaggatgtcttccatagaaactggttccaagaaggatgccttccctgaagctgtgcaggggtgacgatggtccaggcaggaaagggtccattcaacccaatgcagtacagcttctagctgagactcggtgcacgggtgagggcttgaggactcccaggcaacatgaggggttccacaggatctccggaggccacaggtgttaagcaggaactctccatccttgaggcttgctgggggtggcgggatggcagcagggtgtgggtgatcgagtttatggattcaggccaagattcaagggtcaggccccacccattgccctgatgggaccaaccctgttgtgcaatgggctgtcccactggtgcctccttgagcctggtgtgggcagcgtggcttcaatggggttgggtcaaggctgagctctggcccgcacctggtggttggccctgggaattgtggactttgggccaagggtgcagcccgcctgcctctggaggtcatcctacccagaggtggagtggccggaagggtggcaggcatcctgtggtgaaaggcccactgttgagggtcctgtcccaccaatttgctgttcaggctgcttctaagccatgggttcacctccagagaggcgggatcttgagcccagggaaaggagagggcatcatgtgtcccctgattggctgagaatggggagagtgtttgggtggtatgtggtgcatgaatggggacccaccagagaaggcgcgtggccctgggccccaggatgcaatttccggcgtgcttatagagggcgtctgagtggacactctccatgcccaggcgcaggctatgtgactgccaggtctgcagcagtttgtggcatctgggctagcctccttgattgcttatgagctggttgatagccctggcctgtgccgaggggtcctggtgcggccctggggttgttcaggggaagccggcatgggcagtggaggtgctcttggggcctgcagtagggcacagcccaggtgttcttgcttgagcgcagtgaaccacctgccctttccttccagggttcggtagcagggagggccaagggtcccccacgtccatgacaggtcagcgttcctcctggatcccatcacatgggtacatgcagggagagcatgtgtgagccggcactccccactctcttccccgcattgcagggtgaggccctgtttggacccatcttccagctatctcaccagatggtgagcccagaggaagaccccgtggctctgggccagtgtgcgtcagccaggtccccagcccccagtgtgctgaagctcaggcccttcccaacgccctggtctcctgcactgaggtgtggtgagcacaaccaggtcccactggatgcatgcacagggagggatgtgccctaggttgggtcgatgatgagaaccttatattgtcctgaagagaggtgatgacttaaaaatcatgctcaataggattatgctgaggcccagtctaggttaaaattctggaagaggatgctgggatcccaagttcacaggcagggccactgtattttggactagagaactcgaggccctaaagggcatcttgagggggtccaacctgtctctgtgctcctccatgaggcagccctggctccctgtgtggccttggtgttggtgctctggttcccaggcgtggcatgtgggcacctccttccagagcccccattctcccctgtctctttcagtgagctcttccgcccatttgggccctctgacattgaccggcataggtgagtggatcctctttgggtcatgggtcatgagcgaggcaaagtggggtcaccatgcatctgccttcgggccatgagagtttcctaaaagtgtggacctgaattcccaccggggatgagttatccagaagggccacttccttgggaatcggacccaagaaggacgcctgtcctgaagcccagcaggggtggtggtggtccaggcaggaaagggttcattcagcaccaagcaggcagctcccatctgagacttggtgcatcggtcaggccttgaggactgcccaggacacatgaggtggccacaggggctccggggcactacagggggtctgcagagaggggtaggcgattgggtccgtgggggtcatgccgcggagtttcaaggacacccatggccctgaatgggactgaccctgttgagtaatgggccatcccaatggcacctccttgagtctggcggtgggtggtgctgtttccctggggctaggtcaaggctgagctctggctagtgcctgtggtgctgcaggctggccctagaactcatgggctttgggccatggggacagcttgtgtcatgcttggggtcaccccttcccggaggttgaatggcgggagtggtggcttcctaaggtgggaagtcctgctattgagcaacctgtcctgggaatttgccacccaggctgcttctgagacatgaggtcacctccagagtggcagcatcttgggtccaaggaaagaggagcataacatgtgtccccagattggttgagtgtggcctagctctgtgtttgggaggtgtgcagggtgtggatggggatgtatcaaagaaagtacatagccctggagccccaggctgtgatttccagtgtgtgcttggagaggggcaggagcaggctctcgactgccaggtctgcagcagcgcgtggcatccgggcaagccttctggttggccatgtgctggttggtggccctggcctgtgcccagtggtctcagggtagacctggcattgtgcagggcagccagcagggcagtggaggtgctctcaggacctgcagtagggcgcagcctggactttttgtgtgagaccagtgacccacctgcactgtccttccagggttgggtggctgggagggccaagggtggtccatgtttgtctccgtgacacatcagtgctctgcatggatcctatcacatggatatcccctacccaccttccccacatggaagcatgaggccttacttggacatgtgtcctcctgtcctagatggtgagctcggaggaagacttgcattgggcccaatggagctgggccagtttctgtcagccaggtccccagctcctgatgcactgaagctcaggcccttcctggagccctggtctcctgccctgagctgtggtgagcccatctgggtcccactggatgcatgcatgggagggggttgccctcggttgggtcgatgatgagaaccttatattttctgaagagaggtgatgacttaaaaatcatgctcaataggattacgctgaggcccaacctaggggagaattttggaagaggacgctgggatcctgaggtccgtggcagggccaccgtattttgggctggagacctcaaggccctgaagggcatcttggcagcccccagccctgtctctgcactcctccgtgaggcagcccaggctccctgtgtgggcttggtgtcagagtcccattccccaggggcggggcaggttggcggctcctccctgagtcccctttctcccttgtgtctttgagtgacttcttctgcccaggtgggccccctggcgttgaccagcataggtgagtggaacctgctggtgtcatgggccatgagccaggccatgtggggactccaggtcagccttcaggacaggagagtttcctcagggagcaggggaatccccactggggagggatgggttctcccagagggccactttcttttgaatcggacccatggaggacatcttctctgaagacctgcagaagtgatgatgtttcaagcagcaaagggttttttcagcccctgcagggcaggcagctcccagatgagattctgtgcatgggtcaggcctcaagaactgcccaggccacatgcggggtgccacacaggctgtgaggcaccacaggggtcatgcaggagctctcggtcttcaggcttgttgtgggggtggtgacagagtgatcaggcccacagggtcaggctgcagtgtttcaaggatcgcgcccacctgtggccctgaatgggaccgatgctgttgagcaatgagccatcccagtggctccacattgagcctggtgggggcgccactgtttcagtggggatgggtgaagcttgagctctggccagcacctgatggtgttgcaggctggcccagggacttgtgggctttgggccaggtcggcagcctgagttctgctgggggtcacatctttcctgagtttcagtgtcaggatgcatggcctccttaggtgggaaggcctgctgtggagggtcctgtcctgggaatttgctgcccaggctgcttctgagccatggcgtcacctccaggtggtggggtcttgggcccaaggagcagagaagacaccatgtggcccctgattggtcgagtatggcctggctctgagtttgggaggtgtgcagggcatggatggggacccaccagagaaagcacgggccaatgaagccccaggctgcgatttctgatgcgcacttggagagggcgcctggttgggcgcccaccatgcccaagggtaggctatgcaactaccaggtctgcggcagtgcctggcatcaggaccagcctcctttgttggctgtgagctggttggtggccctagcccgtgtccagtgatctctgtgcagccctggggtcatgtggagcagccagtgtaggcaggggaggttatcttgaggtgtgcagtaggcacatcccaggcatcttgcccgagcccagtgacctccctgccctgtccttccagggttcggtggcggggaggcccaagggtaccctgtgtccatgacaggtcagtatttcatgtgaatcccatcacatgggccctcctcctgtccccccagatggtgagcctggaggaagacttgcactgggccttctgtgcgccggccagaggccatcaaccaggtgcccaggtccttttgtactgaagcttgggcccttcctggcaccctggtctccttcatggagctggtgagcccatccgggttcttctggatgtatgcatggggagcggggtgcactgggttgggtcaatgatgagaaccttatattgtcctgaagagaggtgatgacttaaaaatcatgctcaataggattacgctgagtcccagcctaggtgacaattttggaagtggacactgagaatcacaaggaccctggcagggccactgtattttgggctggagacctggaggccctcaagggcctctcacagggacccaaccctgtctctgcactcctccgtgaagcacagcaggctccctgtgcggacttggtgttggcactgtttcccaggggcagggcacattggtggcttttccctgagtccccattcttgccttgtgtctttcagtgagctcttcagctcagaagggccccttcaccttgattagcctaggtgagtgcatcctgctggtgtcatgggccatgagtcaggccgcgtggggtcaccaagggtcagtctttaggacaggagggtttcctcagggagccaacctgtatttccaccggggagggatggtttctacaggagggcggcttccttgggaactggacccaagatgttgccttcctgaagccctgcagggatgacagtggtccaggcagcaaagacttccttcagccccgtgcaggagagctcccagctgagactcagtgcatgtgtcaggcctcgaggattgccgaggccacatgatgggggccacagggcctccggggcaccacgggggtcatgcaagagttctctttccctggagaggggtgcttgaatgagcctatgggattgggccgtggagattcaaggattgtacccaactatgtcccaaaatgggactgaccctgttgagctatggaccatcccatggtgcctctttgagcttggtggggggcagtgctgtttccctgggtttgggtcaaggctgagctctggccagtgcctggtgaggctgtgggccggacctgggactcgtgagctttaggccaagtcgacagcttgtgtcctgctggaggtcaccccttccccatgggtgagtggctggaagagtggaatgtgcggtgggaaggcccgctgttgatggtcctatcctgagaatttgctgcccagactctctgtgccatggggtcatgtccagggtggcagggtcttgggcctagggaaaggaaaggacaccatgtggcccaggattggccaagggtggcccggatctgtgtttgggacatgtgtggggcatggatggggacccaccagagaaagcacatggccctggtactccaggctgtgatttcaggtgtggcttggagagagtgcctgggcaggtgcccaccatgcccagcggcaggctatgcaacttccatgtccacggtggcacatggcttctgggccaggctcctcggttggccatgagcatgtcggtgaccctgtcccatgctcagtggtcctggggcagccctgggatcgtgtgaaggagaagtcagagggggcactggatgtgccctcaaggtctgcaatagcatgaagaccaggggtcttgcccaagcccagtgatccacctgccctgttttttcagggtttggtgatggggagggccgagagtgccctgtatccgtgacaggtcagtgttccacatggatcccatcacatgggtatcccttaccccattccccacctggaggtatgaggccctgtttggacacatgtcctcctcctgtccatccagatggtgagcctgaaggaagacttgcatcaggaccaatggaccctggcaagtgtccgtcagccaggtgctcagcccctggtgcactgaagctcaggcccttcctggccccttgatctcctgcactgagctgtggtgagcacatccgggtcccgctggatgtatgtgtgggcagggggggtgccctgggttgggtcaatgatgagaaccctatattgtgttgaagagaggtgatgacttaaaattaccatgctcaatgattacgctgaggcccaacctaggtgagaaatttggaggaggatgctgggatcccgagatttccggcagggccactgtattttgggctggagccctggaggccctgaaaggtatctggaggaggcccaactctgtctctgcactcctctgtgaggcagcccaggctccctgtgcgggcttggtgttggcctttctgttccccagtgaagtggcacgtgggtggctcctccctgagccccagttctccccttgtgtctttcagtgagctcttctgccaagggggggcctcctggcattgaccaacataggtgagtggatcctgctggcatcatgggcatgggttcactgagggtcagacttcaggccatgagggtttcctcagggagctgaccccaattcccatcagggagggatggtttctccaggagggcggcttccttgggaatcttacctgaggaggatgccttccctgaagatctgcaggaatgacaatggtccagatagcaaagggttccttcagccccatgcaggacatcgcccagttgagacttggtgtgcaggtcaggccttgaggactgcccaggccacatgaggcgggccagaagggctccagggtgccacgggtttcacttgggagctctcggtccccgggcatgttcctggggggggtggtgatggggtcgggccatggaggttcaaggatctcatcccacctgtgaccctgaatggggctgatcctgttgaacaatgggccatcccagtggcacgtattgagcctggtcaggggtggtgcagtttcaatggggttgggtcaaggttgagatctggccagctcctggtggtgcttcaggccagtcctgtgacccatgggctttgggctaagggggcatcccatgtcccatgggggtcacctgttctccatgtttgagtggcagtaacagtggcattctgaggtgggaaggtccactgtctagggtgttgtaccgggaatttgccaccccgccttcttagccaaggggtcacctccagggtctcgggatcttgggcccaaggaaacgagaagataccatgtggcccttgattggccgagtgtggcccagctctgtgtttgagaggtgtgggatatgaatggggtcccaccagtgaaagctcatggcccaggtccccaggctgtgatttttagtgcacacttggggagggctcctcagtgggtgcccaccacgcccagaggcaggctatgtgactgccaggtctgcaacggtgcatagcttccaggctaccctccttggttggctgggagcgggttggtggccatggcccatgcccagtggtcacagggcaaccctgggatcatgcaggggagctggtgagggcagtggaggtgctctccggaacggaagtatggctcagcccaggtatctggcccaaacccaatgaccagcctgccttgtttctcagggtttggtgatggggagggccaagggtgccctgcatctgtgatgggtctgttccacatagaacccattacaggggatcccttctccacatggagatgtgaggccctatttggacacatatcctcctcctgtccccccagatggtgagcctggaggaagatttgcattgggcccaatggccctgggccagtgtctgtcagccagtttcccagcccctggtgcactgaagctcaggcctttcctggcatcctggcctcctgcactgagctgtggtgagtatatcatggtcctgctggatgcatgtgcagggagggaaggtgccttgggttcagtcagtgtcgagaaccttatattgttctgaagagaggtggtgacttaaaaatcatgctcaataggattacgctgaggcccagcctagttgagaattttggaaggggacagtaggatcccgaagtccctggcagggcccttatattttaggctggagacttcaaggccctgaagggcacctggaggtggctcaacctgtctctgtgctcctccatgaggcagtccaggctccctctgtgggctttctgttggcactctggttccctgggccagggaacgttggtggctcctccctgagcccctgttctccccttgtgtctttcagtgagtgcttctgcccaggcaggccacttggcattgaccggtataggtgagtggatcctgctggggtcatgggtcatgagcaaggccacatgggtcgccgagggtcagccttacagccataagggttttctcagggagcccacctgaattcccaccggggaggcataggttctccaggagggcggcgttttggggaatcagacccaagggggacaccttccctgaagccctgcaagggtgatggtggtccaggcaggaaagggtttttttcagccccacacaaggcagctcctagctgagaatcggtgcttgggtcagacctcaaggattgcccaggccacatgagggcgactgagagcctccggggcaccacaggggtcacgtgggagctctcggtgcctggcgtgtgatgcacaaatggacctcttgggtttgttcatggagattcaaggatcgcaccccaccatgcccctgaatgggatggtccctcttgagaaatgggccatcccagtgggtctcctggagcctggttggggggtggcattgtttccctggggttgggtgaaggcagagttctggccggcacctggtggtgctgcaggtcagcactgggacccgtgggcgttgggccaaaggagagcccgaatcccactgggggtcaccctttttccaacatcaaatgtctggaagggtggcctcctgaggtgggaagtcctgctgttgagggacatgtcctgggaatttgtcactcaagcttcttctgagctttggtgtcacatccagggtggcagggtcttgggtccaagcaaagcagagggcaccatgtgtctcctgattggccaagtgttgctggctctgtgtgggaggtgtgcagagtatggatggggacccacgagagaaagcacgtagcactgcaactccaggctatgatttctgttgcatgcttggagagggtgcctggacaagcgtgccatgcccaggggcaggctgggcaactaccaggtcttcagcggagtgtgacatctgggccagcctccttggttggccgtgacctggttggtggcccggctctgtgcctactggccccagggcagccctgggatcatgcaggggagccattttgaacagtggaggtgctcttggggcctgtagtatggcacagcctaggtgttttgctcaagcccagtgacccacctgccctgtcctctccgggatcggtggaagggagggccaaaggtgctccgtgtacttgatgagtcagtatttcacattgaactcatcacatgtgtccatggagggtgagcaagggtgagatggcactgctgacccccttccccacgtagaggtcagtttggacacttgtcttcctcctgtctccccacatggcgaccccagaggaaaacttgtgttgggcccgctgtcactgggccaatgtcagtcagccaggtgcccagcccctggtgcgctgaagcttgggcccttctggcacccttggctcctgcactgagctgtggtgagcccatctgggtcctgctggatgcatgtgcagggagggggatacctgggttaggtcgattatgagaaccttatattgtcctgaagagaggtgatgacttaaaaatcatgcccaataggattacgctgaggcccagcctaggtgagagttttggaagaggatgctgggattctgaggtccctgacagagtaaatgtattttgggctggagaccttgaggccctgaagggcatctggtgggcccacccctatctctgtgctcctccgtgaggcagcccaggctccctgtgctggcttggtatctgggctccggatccctggttatggggcatgttggagtctccttcctgagtccccgttctcccctgtgtcttttggtgagctcttctgcccaagtggtccccgcggccttgagcggcataggtgagtgcatcctgtttcggtcatgggccatgagtgatgcagcatggggtcctcgacattcagccttcgggccactagggttttctcaggctgccaacctactccccaccagggagcaatggtttctccaggagggccacttccttgggaatctgacccaaggagcacatctttcctgaagccctgcaggggtgacagtggtccaggcagcaaagggttccttcagcccaatgtagggcagctcccagctgaaactcggtggacagctcaggcctggagtactgtccagggcacatggggaggaggggcacagggaatgtggcgcaccctagaggttacactggagttctctctccctggagaggggtgagtgattgggcccacacagtcaggctgtgaagattcaaggaatgctccacacccatggccttgaatgggaccaaccctgttgagcagtgggccatcttatggtacctccttgagtctggtgagggatggcactgtttcagtgaggttgggtcaagactgagctctggctggcacctggtgctgctgcaggccctgggacttgggggccttcagtcaagggggcagctctgatcctgctggggacaaaccttccttgaggtccagtggtgaagagtgtcctcctaaggtgggaaggcctgctgtcaagggaatttgccacccaggctgcttctgagccttggggtcacctcagggtggcagggtcttgtgcccaaggaaaggagaagacaccatctggttcctgattggctgagtgtagccgggctctgtgtgtcggagttgggcagggcatggatggggacccaccagagaaagtgtggcccaggggccccccaggcttggagagggcaccagggccggtgcccacaatgctcaggtgctggctctgggagggccaggtctgcagcggcttttggcatctggccaaccaccttggttggccaggagctggttgatggccctgtcctgtgtcctgtgccctgtgccctgtgtccctggtatggccctggggtcatgtgtgggagctggcctgagcagtggaggtgctcttggggcctgcagtagggtacagcctaggcatcttgcctgagccagcactgtcttttgctttccctgtctttccagggtttggtggcagagagggcaaaggatgccccacatctgtgttgggtcagtgttcagcatggatcccatcacatgggtatcccttagccccttccctgcattgatatgtgaggccctggttggacacatgtcctccttctgtccctctagatggtgagcctggaggaagatgtgtgggacccgcaggccgagggccagtgtctctcagccaggtgctcagcccccagtgggctgaaactctgacccttcctggcaccctgctctcctgcactgtgctgtggtgagcacatccgggttccactggatgtttgtgcagggagggggttccctgggttgggtcaatgatgagaacagggccacatgaggggggccagaggggctacagagtgccatggggtaacaagggagctcttggtccctggagtgtggtgtgtgaatgggcccatggggttgggtagcagagattcaaggatcctgctctacccatggccctgaatgtgaccatcgctgttgagcaatgggccatcccagtgggtctcctggggcctggttggggggcggagttgtttccctgggattgggtcaaggttgactctggctggcacctggtggtgttgcaggtcagccctgggactcatgggctttgggccagggacagcccgcatcccgctgggggtcacccaagtgttgtgaagggtggcctcctgagttgggaaggcccgctattgaggcatctgtactgggaatttgttgctcacgctgcatgggagccatggtatcacctccagggtggcagtcttgggaccaagcaaaggagggggcagcatgagactccggattggctatgtgtgactggctatgtgtcttggaggtatgtggagtatggatggggacccaccagagaaaacaagtgaccctgaggccccatgctgtcttttctggtgcctgcatggagagggtgcctgtacgcatgcccaccatgcccaggggcaggctgtgccactgtcaggtctgcagtagcatgtggcatctgggccagcctccttggttggctgtgacctggctggtggcccggacctctgcccagtggtcccagggcagccctagggtcatgcggaggagcagttttggccagtggaggtgcccttgggtcctgcagtcgtgcataccctgggcgttttgcctgagcccagtgacctacctgccttgtccttcccgggttcggtggcagggagagacacttgcataggtgatgagtcagtatttcgcatggatctcatcacatgtgtccatggagggggagcaagcgtgagctggcacccaacacccctttctccacatggagggtggtcacatgttctccacctgttcccctagatggtgagacttctgttgggcttgcttttcctgggccagtgtccatcagccaggtgctcagccatcggtgcgctgaagctccagcccttcctggtgccctgatctcctgcactgagctgtgatgagtacatccgggttccactggatgcatgtgcgggaaggggggtgccctgggttgggtcagtgatgagaaccttatattgtcctgaagagaggtgatgacttaaaaatcatgctcaataggattacgctgaggcccagcctgggggagaattttggaaaaggatgctgggatcccagggtccccaacagggccactgtattttggacctgggacctggtggctctgaagggcatctggaggtggcccaacctgtctctgcactctagtttccctgtgtgggcttggtgtcggtgctccagttccctgggggcagggaatgttgatggctccttcctgagtccctgttctcgcctttgtctttcagtgagctctttcacctaggagggccccttggcattgactggcataggtgagtggatcctgctggtgttatggatcatgagccagaccatatggggtccccaaggatcagcctttgggccacaagggttttctcagggagctgacctgaatttccacctgagacggaaaggttctcctggaaggcaggctttttggaatcggacccaaggaggacaccttctctgaagccctgaaggggtgatggtggtccaggcaggaaagggttccttctgcctaacataggacagtgcctagttgagactcggtgctgcagtaaggccttgaggactgcccaggctacatgaggggggccagaggggctacggggcaccacagggttaatggtgacctcttggtccccagagtgtggtgcgtgaatggacccatggtgttgggttgtggagattcaaggatagtgccccacctatggccctgaatgcaactgtccctgtttagcaatgggccatctcagtgggtctcctggagcctggtggggggcagagttgtttccttgtgactgggttaaggtagagctctggccagcacctggtggtgtggcaggtcagccctgggactcttgggcttttgaccaaggggcagcctgtatcccgctgggggtcatcctatctctgaggtcaagtgtcgtgaagggtggcctcctgaagtgggaaggctcgctgtcgagggacctgtcctaggattttattgctcaggctgcttctgagccatggtgtcacctctagggtgatggggtcttgggaacaagcaaaggggagggcaccatgttgctccggattgggcaagtgtggcccagctctgtgtgtgtgaggtgtgcagaacatggatggtgacccaccagagaaagcacatggccctgtagctctaggttgtgatttccgtgcacacttggagacagcatcttgatgtgtgcccaacacgcccaggggcagactatgcgatagccaggtctgcagcggtgtgtggcatctgggccagccacctttgttggccatgagctggctcatggccctgacccatgcccactggtgtcagggggccctggcgtcgtgtgaggagccatctgtggcagtggaggtagactcagggcctgcagtatggcgcaacccatgcattttgcctgagctcagtgacctacctgccctgttcctccagggtttggtggcagggggagccaagggtgccccacattggtgacgagttagtacttcacatggatctcataacatgtgtccgtggagggcaagcaaatgtgagcccgcacccactactgccttccccacatggaggtcagtttggacacatatcatcctgctgtcccccaaatggtgagaccgaagaagacttgccctgggccctctgttcttgggccagtgtcagtcagccaggtgcccagctctaagtgcgctgaagcttgggcctttcctggaatgctcggctcccgcactgagccagggtgagcacatccgggtactgctggatgcatgtgtggggcaggggtgcgccctgggttgggctgatgatgagaaccttatattgtcctgaaaagaggtgatgacttaacaatcatgctcaataggattacattgaagcccaggataggtaagaattagggaagatgatgcagggatcccaagatctccagctagaccacacttattttgcactggagaacttgagaacttgaagggcatctcaggggagcccaaccctgtctctgagctccttcgtgaggcagcccaggctccccttgcgggcttggtgtctgtgctccgcttctccagggacagggcaatttggtgttccttcctgaatgctccttcttccctgtgtccttcagtgagctcttctgcccaggtggggtccctagctttgagcggcataggtcagtgcatcctgttggggtcatgggccatgagtgaggcagcatggggttggtgagagtcagccttcaggccactagggttttctcagggagccaaccgattactcaccgggagggatggttcctccaggagggtcacttcttgggaatctgaccctaggagcacacatttcctgaagctcggcagggagatggtggtccaggcaggaaagggttccttcaacctaacgtagggcagttcccagctgaaactaggtgggcaggtgaggcttgaggactgcccagtccacatgaaaggggccacaggggctttggggtgccctgggagtcatgctggagttcttcccccaagagggatgggtgatagggtccacgtggtcaggctgcggagattcaaggaatgccacccacccatggccctgaatgggaccaaccctgttgagcaatgggccattttcggcatgtttcaatgcagttgggtcaaggctgagcgctggctggtgcctggtggtgctgcaggccggccctggggctcatgggctttatgccaagggggcaactcccatcccactggggtaatcccttccttgaggtccagtggtgggaagggtggcctcctgaggtgggcagacctgctgtcaagggacctgtcctgggaatttgccacctaggctgcttctgagccatggggtcacctccaggatggcggggtcttcagcccaaggaaaggagaggacaccatgtggtttctgattggctgagtgtggcctggctgtatgtgtgggaggtgtgcagggcatggatggggactcatcagagaaagaatgtggccctggaggcccccaggctttgatttctggtgtgtgcttggagtgggcaccagggtggccctaccatgcccaggggcaaggtctttgcctgccaggtctggagtggctcctggcatcaggaccaccctccttggctcaaccaaccttcagcaggttggctgccttggcccgtgccccatggtcccggtacgaccctggggttgttcgggggatctggcccaggcagtggaggtgctcttggggcccacagtagggcacagcccaggcctcttgccccagcccagtaacccacttgccctgtctttccagggttttgtggcagggaaggccaagggtgctctgcgtccatgttgggtcagtgttctgtaaggattccattacaagggtatcccctacccaccttccctacattgatacatgaggccctggttggacacatgtcctcctcctgtccctacagatggtgaccctgaagaaagacttcagttgggcctgaaggccccgggccagtgtccatcatccaggtgctcagctcccagtgcactgaagctcagacccttcctggttccctggtctcttgcactgagctctggtgagcacaactgggtgctgctggatgcatgcatggggaggggggtgccctgggttggggtggtgatgagaaccttgtattcttctgaagagaggtgatgacttaaaaaccatgctcaataggattacacttaggccgaacctaggtgagaatgttggaagaggacgttgggatcctattatccctggcagagccactgtattttgggctggagacctggaggccctgaaagggcatctggagggggcccaaccctgtctctgtgctcctgcatgagggtccccaggctccctgtccagccttggtgttggtgctctggtaccctggggatggaacaagttggtggctctttcctgagcccccattctccctttgtgtctttcagtgagcttttctgcccaggtgggcaccctggcattgattagcctccttggttgtccatgacctggctggtggcccgatcctgtgcccagtggtcccagggcagccctggcatcatacggggcagctgttttgggcagtggaggtgctctccaggcctgaagtatggcacagcctgggcattttacctgagaccagtgacctgcctgccttgtccttcctgggttcggtggcagggagggccaagggtgccctgcgtcagtgatgagtcagtattttgtgtggatctcatcacctgtccatggagggaaagcaagcatgagctggcacccaacacccccttctccgcatggagggtggtcacatgtcctccacctgtgcccccagatggtgagacttgaggaagacttccactgggcctgcttttcctgagccagtgcccatcacccaggtgctcagtccctggtgcactgaagctccagcccttcctggcgccctggtctcctgaactgagctgtggtgagcacatccgggtttcactggatgtttgtgcggggagggggttctctgggttgggtcaatgatgagaaccttatattgtcctgaagagaggtgatgacttaaaaatcatgctcaataggattacgctgaggcccagcctaggggagaattttggcagaggatgccgggatcccaagatttccgggagggccacttgtattttgggttggagacctggaggccctgaagggcgtctggaggtggcccagtgctttctttgcgctcctctgtgaggcagcccaggctccctttgtgggcttggtgtttgcgctcctcttctccagtgatggggcacgttgggggctcctccctgagtcctggttctccccttgtgtctttcagtgagctcttctgccaagcggttcccctggcattgaccaacataggtgagtggatcctgctggcatcatgggctatgagctaggccgcatgggtttgctgagggtcagacttcaggccccaagggtttcctcagggaaccgacctcaattcccaccatgtgactgccaggtttgcaacagtgcatagcttccgagctaccctccttggttggccgggagctggttggaggctgtggcccatgcctagtagtcacagggcaggcagactgccctgttttttcagggtgtggtgacggggagggccaagggtgccctgcatccatgatgggtcagggatttcaggagggatggtttctccaggagggcagcttccttgggaatcttacccaaggaggatgtcttccctgaagccctgcaggggtgacgatggtccagatagcaaaggtttccttcagccccatgcaggacatcacctagttgagatatggtatgtgggtcaggccttgaagactgcccaggccacctgaggggcccagaagggctctggggtgccacaggtgttatgtaggagctctcagtccccagacttgtttcgtggggttggtgacggggttgggttgtggaggttcaaggatttcatcccacctgtgaccctgaatggggccaaccctgttgagcaacaggccatcccaatggcacgtattgagcctggtggggtgtggtgcagtttcaatagggttgagtcaaggctgagatccatctggtgcttggtgctgctgctggccagccctgggacccgtgggctttgggctaagggggtagcccacatcctattgagggtaacccattctccgagtttgagtaacggttaacagtggcattctgaggtgggaaggcccactgtctagggtcctatactgggaatttgccaccccgggttcttctgagacaagtggtcacctccagggtcatggggtcttgggcccaaggaaaggagaagataccatgtggcccttgattggctacatgtggcccaggtctgtttgggaggtgtgtgggatgtggatggggtcccaccaatgaaagcacatggcctgggtccccaggctgtgattttcagtgcacacttggagagggtgcctcggcgggtacctaccacatccatgggcaggctatgtgactaccaggtttgcaacagtgcatagcttccaagctaccctccttggttggtcgggagctggttggaggctgtggcccatgcctagtggtcacagggcaggcagacggccctgttttttcagggtatggtgatggggagggccaagcatccatgatgagtcggtgttccacatggaacccattacgtgggtatctcttaccccttcctcatatggagatgtgaggccctatttggacacatatcctcctcctgtacccccagatggtgagcctggaggaagacttgcgttgggcccaaaggccctagaccagtgtctgtcagccaggttcccaacccccgatgcgctgaagctcaagcctttcctggcaccctggtctcctgcactgagctgtggtgagtatatcctggtcctgctggatgcatgtgcagggaggtgggtgccttgggttgggtcaatgatgagaaccttatattgttctgaagagaggtgattatttaaaaatcatgctcaataggattacgctgaggcccagcctagttgagaattttggaggaggacactgggataccgaagtcccccgcagggactctgtattttgggctggagaccttgaagccctgaagggcatctggaggtggcccaacctgtctctgtgctcctccctgaggcagcccaggctccttttgtgggcttggtgttggggctccagttccccaggtcagggaatattggtagctctttactgagcccctgttctccctttgtgtctttcagtgagctcttctgcccaggcgggccccctggaattgatgggtataggtgagtgcatcctgctggggtcatgggccatgagccaggccacgtggggtcaccaggggtcccccttctggccatgagggttttctcagggaaccgacctgaattaccactggggaggcataggttctccaggagggcggctattttgggaatcggatccaagggggacaccttccctgaagccctgtgggtgtgatggtggtccaggcaggaaagggtcccttccaccccacacagggcagctcatagctgagagttgatgctcaggtcaggcctcaaggatttcccaggccacatgagggggacagaggagctctgggtgccacgggggtcacataggagctctcagtattcggtatgtcatgcacaaatgggcctcttgggttggattgtggagattaaaggatcgcgcaccaccgtggccctgaataggaccatccttattgagcaatgggccatcccagtgagtctcctggagcctggtggaggggagggggtggcattgtttccctggggatgggtcaaggcagagctctggccagcaccttgtggcttctgcaggtcagccttgggactcatgggcattgggccaagggggagcccgcgtcccactgggggtcaccctttttccgacgtcaagtatctggaagagtggcctcctgatgtgggaaggcctgctgtcgagggacgtgtcccaggagtttgtcgctcaagtttcttctgagctttggggtcacatccagggtggcggggtcttgggcccaagcaaagcagagggcaccaagtgtctcctgattggccatgtggctgtctctgtgtgtgggaggtttacagagtatggatggggacccaccagaggaagcacgtggccctgcagcaccaggctgtgatttctgttgcacacttggagaggttgcctggacacgtgcccttcatgcccagtgacagactatgcaactaccaggtctgcagcagggtgtgacatctgggctagcctccttggttggccgccacctggctggtggcccggatctgtgcccaacagtcccagtgcagcactggggtcatgcaggggagctgttttggacagtggaggtgctctcggggcctgcaatatgatgcagcctgggcgttttgctcaagcccagtgacccacctgccctttcctttctgggttcagtggaagggagggccaacagtgtagtgcgtacttaacaagtcagtatttcacattgaactcatcacatgtgtccatggagggcaagcaaaggtgagctggcacccccgacccccttccccaaacggaggtcagtttgggcacacgtctccctcctgtctccccagatggtgaccccggaggaaaatttgtgttgggcccactatccctgggccaatgtcagtcagctaggcacccagcccccagtgcgctgaagctcaggaccttcctagtgccctcggctcctgcactgagctctggtgagtccatctgggtcctgctggatgcatgagctgggggcgggagggtgccctgggttgggtcagtgatgagaaccttatattgtcctgaagaaaggtgatgacttaaaaatcatgctcaataggattacactgaggcccagcctaggtgataattttggaagaggatgctggaattctgaggtccctgacagagcagctgtattttgggctggagaccttgaggccctgaagggcatcttgtgggcccacccctatctctgtgctcctctgtgaggcagcccaggctccctgtgctggcttggtatccgggctctgggtccctggtgacggggcatgttggaggctccttcctgagcccctgttctcccttgtcattcagtgaactcttctgcacaagtgacccccccagccttgagcggcataggtgagtgcatcctgttttggtcatgggccatgagtgatgcagcatggggtccctgacattctgcctttgggccaccagggttttctcaggctgccaacctactccccaccagggagcgatggtttctcaggagggctgcttccttgggaatctgacccaaggagcaagtctctcctgaggccctgcaggggtgacagtggtccaggctggaaagggttccttcagcccaatgtagggcagctcccagctgaaactcagtgggcaggtcaggcctcgagtattgcccaaggcacatgggggagtgaggcacgggggatacagtgcgccgtggaggtcacactggagttctcccctccctggagagggatgagtgactgggtccacacggtcaggctgtggagattcaaggcatgctccacacccatggccttgaatgggaccaaccctgttgagcaataggccatcttagtggcacctccttgagcctggtgggggacggcactgtttcaatgaggttgggtcaagagtgagctctggctggcacctggtggtgctgcaggccctgggacttgtggactttgggccaagggagcagctctgatcctgctggggacaagccttccttgaggtccagtggtgaaaagagtgtcctcctgagatggcaaggcctgctgtcgagggacctgttctaggaatttgctgcccaggctgcttctgagccttggggtcacctcagggggtggcagggtcttgagcccaagaaaggaaaagacacgatgtggttcctgattggctgagtgtgacccggctctgtgtgtcagagttgggcaggacatggattgagacccaccatagaaagcatgtgatcctggaagcccctaggcttggagagggcaccagggccagcgcccaccacgcctaggtacgatctctcggacttccaggtctgcagcggctcttggcgtctgggccagcatgcttggttggccaggggctggttggtggccctgtcttgtgccctgtgtccccggtatggccctggggttgtgtgtggtagcaggcctgggcagtggaggtgctcttggggcctgcagtagggtgctgcccaggcatcttgcccgagccaggtgacacgcttgccctgtctttccagggtttggcggcagggagggccaagggtgcccagtgtccgtgagggatcagtattcagcatggatcccatcacatgagtatcccttagccccttctctacattgatgtgtgaggccctggttagacacatttcctcctcctgtccctccagatggtaagcctggaggaagacttgtgttgggcccacaggccccaggccaatgtctgtcagccaggtgctcagcctctggtgcgctgaaactctgacccttcctggcacactggtctcctgcactgagctggggtaagcacatctgggttgcactggatgtttgtgtggggagggggttccctaggttgggtcaatgatgagaacctgatattgccctgaagagagatgatgacttaaaaatcatgttcaataggattacgctgaggcctagcctaggtgagaattttggaagcagatgctgggatcccaaggtcccttgcagggccatcgtatgttgaactggagacctggaggctctgaagggcatctggaggtcgtgcaacctgtctctgcactcctctgtgaggcagcccaggctccctgtgtggggttggtgttggtgctatggttccctgggggtggggaacattggtggctccctccagagcccctgttctcaccttgtgcctttcagattttccacctaggaggtccacctggcattgactgacataggtgagtggatcctgctggggtcatgggtcatgagccagaccatggggggatcccagagattcagtctttgggcaacagttttctcagggagcagacctgaatttccacctgggagggaagggttctcctggagggcgacttttttgggaatcggacccaaggaggatgccttccctgaagccctgccggggtgatggtggtccaggcaggaaagttccttctgctcaatgcagggcagcacccagctgagactcggtgctccggtaaggcctccagaactgcccaggtcacataaggggggccagaggggctacgaggtgccacggggtaacaggggagctcttggtccccagagtgtggtgcatgaatgggcccattccgttgggtctcagagatttaaggattgcaccacaccatggccctgaatgcaaccgtccctgttgatcaatgggccatcccatgggtctcctggagcctggtgggaggcagtgttgttttcctggggttgggtcaaggcggagctctggctggtacctggtggtgctgcaggtcagccctgggacttgtgggctttgggccaaggggcatcccgcatcccgctgggggccaccctttctccatggtcgagtgtcgtgaagggtggcctcctgagttgggaaggcttgctattgaggcacttgtactgtgaatttgttgctcaggctgcttgggagccatggtgtcacctccagggtggcagggtcttgggaccaagcaaaggagtgggcaccatgtcactgcagataggccatgtgtgactggctctgtgtctgggagatatgtggagtatgaatggggacccaccattcatagagaaagcaagtggccctgcagcccgaggctatgatttccggtgcacacttggagagggtgcctttacacccaagtaccaggctcagaggtaggctatgccactatcaggtctgcagtggcacgtggcatctgggccagcctccttggttggccatgacctggctggtggcctgggcctgtgcccagtgttcccagggtagttctagggtgctgcgggggagctgttttggctagtggaggtgctcttgggtcctgcagtacagcacagcctgggcgttttgcctgagcccagtgacctgcctgccttgcccttcccaggatcggtggtagggaagaccaggggtgcccggcataggtgatgagtcagtatttcacatggatatcatcacatgtgtccatggagggggagcaaacatgagctggcacccgccacccccttctccacatgaagggtggtcacacgttctccatctgttcctccagatggtgagacttctgtcggcctcgcttttcctgggccagtgtccatcagccaggtgctcagccccagtgcactgaagctccagcccttcctggcgccctggactgagctgtggtgagcacatccgggttccactggatgcgtatgtgggaaggggggtgccctgggttgggtcaatgatgagaaccgtatattgtcctgaagagcggtgatgacttaaaaataatgctcaataggattacgctgaggcccaccctaagtgagaaatttggtaggggatgttgggatcccgagatttctggcagggccactgtagtttgggttggaggcctggaggccctgaagggcatctggaggtggctcaactctttctctgtgctcctccgtgtagcagcccaggctccctgtgcgggcttggtgttgttgcttctgttccttgggggcagggcatgtgggtggctcctccctgagccccagttctccccttgtgtctttcagtgagctcttctgccaagggggtcctcctggcattgaccaacataggtgagtggatcctgctgctgtcatggtccgtgagccaggctgcttggggttgccaagggtcagacttcgggccatgaaggtttcctcagggagctgaccctaattcccatgagggaggcatggtttctccaggaggtcagcttccttgggaatctgtgacttgacagggttgagtcgcagaggttcaaggatctcatcccacctgtaaccctgaatggggcccaccctgttgagcaactggccatcccagtggcacatattgagcctggtggggggtggtgcagtttcaatggggttgggtcaaggctgagatatggctggtgcctggtggtgctgcagtccagccctgggatccgtgggctttgggctgagggggaagcctgcatcctattgggggtaacctgttctccaaatttgagtgattggtgggaaggcctactgtctgaggtcctgtactgggaatttgccacctcagcttcttctgagccatagggtcacctccagggtcatggggtcttgggaccaaggaaaagagaagataccatgtggcccttgattggccgagtgtagcccagctctgtgtttgggaggtgtgtgggatgtggatagggtcccacctgtgaaagcatgtggcccgggtccccaggctgtgattttcagtgcacacttggagagggcaccttggtgggtgcccaccatgtccaggggcaggctatgtgactgccaggtttgcaatggtgtgtagcttccttctaccctccttggttggctgggagtgggttggttgctgtggcccatgcccagtggtcacagggcaggcagactgccttgttttttcagggtatgctgacagggagggccatgggtgccctgcattcatgatgagtcagtgttccacatggaacccattatgtgggtatctcttattccttctacatatggagatgtgaggccctatttggacacatgtcctcctcctgtacccccaggtggtgagcctggaggaagacttgcattgggcccaatggccctggaccagtgtctgtcagccaggttcccagcccccgatgcgctgaagctcaagcctttcctggcaccctggtctcctgcactgagctgtggtgagcatatcctggtcctgctggatgcatgcgtggggaggggttgtcctaggttgggtcaatgatgagaaccttataatgttctgaagagaggtgatgacttaaaaatcatgctcaataggattacgctgaggcccagcctaggtgataattttggaagaggacactgggtcccgaagccccctgcagggcccctgtgttttgggctggagaccttgaggccctgaaaggcatctggtggacccaactctatctctgccctcctcaatgaggcagcccagcctccctgtactggcttggtatccgggctccgggtctctggggacggggcacattggaggctccttcctgagcccccattctctcctgtgtctttcagtgagctcttcggcccaagtggtccccccggccttaagcggcataggtgagtgcatcctgttttgatcatgggccatgagtgttgcagcatggggtccccgacattcagccttcaggccactaggcttttctcaggctgcaaacctactctccaccagggagcgatggtttctcaggagggccacttccttcggaatctgacccatggagcacgcctttcctgaagccctgcagaggtgacagtggtccaggcaggaaggggttccttcagccccaatgtagggcagctcccagctgaaacttggtggacagatcaggcctggagtactgcccagggcatatggggaggagggacacagggaatgtggcgcaccctagaggtcacactggagttctgtctccctggagaggggtgagtgattgggcccacatggtcaggctgtggagattcaaggaatgctccacaccgatggccttgaatgggaccaaccctattgagcaatgggccatcttagtggcacctccttgaacctggtgggggatggcactctttcaatgaggttgggtcaaggctgagctctggctggcacccagtggtgctgcaggctggccctgggacttgtgggctttgggccaagggggaagcttccatcctgctgggaacaacccttccttgaggtccagtggcaggaaggggggcttcctgaggtggaaagccctactgttgagggacctgtcctgggaatttgctgtccaagctgcttctgagccatggggtcacctctagggtggtggggtcttgagcccaaggaaaggagaggacaccatgtggttcctgattggctgagtgtggcccggctctgtgtgtcggagttgtgcagggtatggattgggacccaccagtgaaagcacatggccctggaggtccgcaggcttggagagggcaccagatctggcacccaccatgcccaggtacaggctctgggactgccaggttgcagcagctcttggcatctgggccaccctccttggttggccaggagctagttggtggccctgtcccatgccccatgtccctggtatggccatggggtcatgcagaggaaccggccctggcatggaggtgctcttgcaacatgcagtagggtgcatcccaggcatcttgcctgagccaggtgacccgcttgccctgtctctccagggtttggtggcagggagggccaagggtgccccgtgtccatgttgggtcagtgttcagcatggatcccattgcatgagtatcacttagctccttcccagcattgatatgtgaggccctggttggacacttgtcctcctgtccctccagatggtgagcctggaggaagactcgtgttgggcccacaggccccaggccagtgtacgtcagccaggtgctcagcccatggtgtgctgaagctctgacccttcctgactccgtggtctcctgcactgagctgtgatgaccatatccaggtcctgctagatgcatgcgtggggaggcagggtgccctgggttgggtcaatgatgagaaccttgtattatcttgaagagaggtgatgacttaaaaatcatgctcaataggattacactgaggcccagactaggtgagaattttggaagaggatgctgggatcctgaggtccccaacagggccaccatattttgggctggagacctggaggtcctgaagggcatctgtagggggcccaaccctgtctctgcactcctccctgaggcagcccatgctccctattcgggatcggtattggtgctccacttccctgggggcaggacacgtgggtggctactccctgagcccccgttctccccttgtgtctttcagtgagctcttccaaacaggtgggctccctagcattgaccgacagaggtgagtggatccttctgggattatgggccatgagccaggccatgtggggtccccaaggttcagcctttggatcccgagagttgtctcagacagccaacctgatttgccacctgggagagatggcttctccaggagggtgggtttttgggaattggacccaaggaggacgccttccctgaagccctactgggatgatggtggtccaggcaggaaagggttccttcacccagctgagactcggtgttccagtaaggcctcaaggacctccctgccacatgaaggggcccagaggggctacgaggcaccacaggagtgacaggggagctcttggtccccagagtgtggtacatgaatgggcccatggggttgagtcgcagagattcaaggatgctgcaccacccatggccctgaatgtgactctcctcctggagcctggtggggggtggcgttttttccctggggttcggtcaaggtggaactctggtcagtacctggtggtaatgtaggtcagccctgggactcgtgggctttgggccaacggacagcccacatccctctgggggtcaccctttctctgaggtcgagtgtcgtgaagggtggcctcctgaggtgggaaagcccaatgtcgaaggacctgtactgagaatttgttgcttaggctgcttaggatccatgttgtcacctccagggtggtgggatcttgggaccaagcaaaggagagggcaccatgtggctgccagtggctatgtgtgactggctctgtgtctgagaggtgtgtggatggggacccaccagagaaagcaagtggccctgcagccccaagatgtgatttctggtgcaggcttggagagggtgcctatacctgctcccaccacgcccaggggcaggctttgccactgcaggtctgcagtgccacgtggcatctgggccagccaccttggttggccgtgacctggctggtagcccgtgcctgtgcccagtgttcccagggctgccctggggtcttgctggggagctgttttgggcagtggaaatgctcttggggcctgcagtatggcacagcctgggggcattttgcctgagcccagtgacctgcctgccttgtccttcctgggttcggtggcagggagggccaagggtgccctacattggtgacaagtcaatattttgcatggatctcatcacgtgtccatggaggtgggggcaagcgtgagctggcacgcaccccattctccccatggagggtggtcacatgtactccacctgtgtccctagatggtgagactggaggaagacttccattgggcccacttttcatgggacagtgtccatcagccaggtgctcagcccccagtgcattgaagacccagcccatcctggcaccctagtctcctgcactgagctgtgctgagcacatctggcttccactggaagttttttttgcgaggaggggcttccctgggttgggtcaatgatgagaaccttatattgtcctgaagagaggtgatgacttaaaaatcatgctcaataggattacgctgaggcccaacctaggggagaattttggaagaggattatgggatcccaaggtccccaacaaggccactgcattttgggctagagacctggaggctcttaagagcatctggaggtggcccaacctgtctctgctccttcgtgatgcagcccaggctccctgtgtgggattggtgttggtgctccatttccctggcatggggaatgttggtggctccttcctgagctcctgttctcgccttgtgtctttcagtgagctctgccacccaggacatccccctggcattgactggcataggtgagtggatcctgctggggtcattggtcatgagccagaccatgtggagtccccaaggttcagcctttgggccacaaaggttttctcagggagcagacctgaatttcacccgggagggaagggttgtcctggagggtggcttttttgggaacctaacccaaggaggacccattccctgaagccctgcaggggtgatggtggtccaggcaggaaagggttccttctgctcaatgcagggcaacacccagctaagatgcggtgatctggtaaggcctccagaactgcccaggccatatgaggggggccagaggggctacagggtgccacaggggtaacaggggagctcttggtccttggagtgtggtgcctgaatggacccatgggattgggttgtgtagattcaaggatcacaccctacccacagccctgaatgtgactcttcctcttgagcaatgggccatctcagtgggtctcctggagcctggtcggggggtggtgttgtttccctggggttgggtctaggtggagctctggctggtacctggtggtgctgcagatcatccctgggacttttgggctttgggccaagggacagcccgcatcccgcttggggtcagcctatctccatggtcaagtgtcatgaagggtggccccctgaggtgagaaggcctactgtcaagggatctgtcccaggattttgttgctcaggctgcttctgagccatggcgtcacatccacagtggcagggtcttgggcctgagcatagcagagggcaccatgtcgttctggattggccaagtatggcctagctctgtgtgcgggaggtgtgcagagcatggacggtgacccaccagagaaagcacgtggccctgcatcccaggctgtgatttccaatgcacacttggagagggtgtcttgatttgtgcccaccatgcccaggggcagactacgtgatagccaggtctgcagcctgagccacgtgtggcatctgggccagccaccttggttggccgtgagctggctggtggccttggcctgtggccagtggtgccagggcggccctggggtcgtgtgggggagccatgttgggcagtggaggtgctgtcagggcctgcagtacagtgcagcctgggcatttggcctgagcccagtcacccgcctgctctgttcctccagggtttggtggcggggagggccaagggtgccccgcatccgtgacgactcagtaattcacatggatcacatcacatttttccttggagggcaagcaaatgtgagcccccaccccccactgccttccccacatggaggtcattttggacacatatcctcctctagtccccctagatggtgagactggaggaagacttgcattatgcccgctgttcctgggccagtgtcagtcagccaggttcccagctccaagtgtgctgaagctcaggcccttcctggcaccctcagctcctgcactgagctggggttacatccgggttccactgtttgcatgcaaagggaggggtgtaccctgggttgggctgatgatgagaaccttatattgtcctgaaaaaaggtgatgacttaaacatcatgcttaatagtattatgctgaagcccaagctaggtgagaattttggaagatgaggctgggatcctgagatccccggcagggccacacttattttgggctggaaaatttcaagacctgaagcgcatcttgtgggggggcaatcctgtctctgtgcttctccgtgaggcagcccaggctcccgttgcgggcttggtgcccatgcttcgcttccccaggggtggggcaatttggcatcctcttcctgagccctccttcttccctgtgtctttcagtaagttcttcttcccaggtggggcccctggctttgagcggcatgggtcagagcatcctgtcagggtcatgggccatgagtgaggcagcgtcggttcgtcgagagtcagcctttgggccactggggttttctcagggagccaacaggttacccatcaggagggatggttcctccaggagggtcgcttccttgggaatctgactctaggagcatgcatttcctgaagctctgcagggtgatggtggtccaggcgggaaagggttccttcagcccaacataatgcagttcccagctgaaactcggtggcagatcaggctcaaggactgctcgggccacatgatgggggccacaggggatttggggtgccctgggggtcatgctggagttcttgccccaagaggggtgggtgatagggcccatgcgatcaggctgcggagattcaaggaatgctacccacccatggccctgaatgggactgaccctgttgaacaatgggccattttaatggtgcctccttgagcctggtaggtagtggcattgtttcaatgcggttgggtcaaggctgaactctggctggtgcccggtggtgcccacatgggctttgggccaagggggcagctcatatccctctggggtcaccccttccttgagattcagtggcaggaagggtgttctcctgaggtggaagacctgctgtcaagggacttgtcctgggaatttgccacctaggctgcttctgagccatggagtcacctccagggtggcagggtcttgagcccagggaaaggagacaccatatggtttctgactgggagtgtggcctggatctgtgtgtgggaggtgtgcagggcatggatggggacccatcagagaaagcatgtggccctgtaggcccccaggctttgatttctggtgtgtgcttgcagtgggcaccagggcagccctaccatgcccaggggcaggctctgtgactgccaggtctggagtggctcctggcatgaagaccacgctccttggttggccatgagcaggttggttgccctagcctgtgccctgtggtcctggtgcagccctggggttgtttggggagacagcaccggcagtggaggtgctctcaaggcctgcagtagggcgcagcccaggtgtcttgcccgagcccagtaacccacttgccctgtctttccagggtttggtggcagggagggccaactgtgccccgcatctgaaatggatcagtgttctgcatggatcccatcacaagggtatcccctacccaacttctgtgcattgttatgtgaggccctggttggacacatgtcctcctcctgtccctgcagatgctgaccctggaggaagacttgtgtcgggcccccaggccccaggccagtgtccatcagccaggtgctcagctcccagtgcgctgaagctcagacccttcctggcaccctggtgtccagcactgagctgtggtgagcccatccgggtcctgctggatgcatgaatggggaggggcctgcccagagttgggtcaatgatgagaaccttacattgtcctgaagagagatgatgacttaaaaatcatgctcaataggattacgctgaggcccagcctaggtgagaattttggaagaggacggctgggatcctgagatcccagtcagggtcactgtattttgggctggagacctggaggccctaaagggcatctggaagggggcccagccctgtctctgtgctcctccgtgaggcaacccacactccctgtgtgggcttggtgttggtgctctggttccccagggacagggcgggttggtggctccttcctgagcccctattctccctttgtgtctttcagtgagcttttccacccaggtgggccccctggcattgaccgacataggtgagtgcatcctactgggataatgggccactagatagtctgtgtggggttgctgaggtttagcctttgggccacaagggttttctcaggcagccaacctgaattcccacctgggagagatgggttctccaggaggcagcttttttgggaatcagacccaaggaggacaccttccctgaagccctgcaggggtgatggtggtccaggcaggaaagggttccttctgcccaactcgaggcccaatgcagggcagtgcccccctgagaattggtgctctggtaagggctcgaggactgcccaggccacatgaaggaggtcagaggggctatggggaaccatgggggcaacaggggagctcttggcccccggagtgtggtacatgaatgggcccatggggttgggtcacggagattcaaggattgcatctcacccacggccctgaatgcgaccatccctgttgagcaatgggccatcccagtgggtctcctggggcctggtgtggggtggcattgttttcctggggttgggtcaaggcggagctctgactggtacctgatggtgctgcaggtcagccctgggactcgtgggctttgggccaagaggcagcccgcatcctgctgggggtcgccttttctccgaggttgagtgtcgtgaaggatggcctcctgaggtgggaaggcccactgtcaaggcacctagactaggaattgttcctcaggctgcttgggagccatggtgtcacctccagggtggcgggatcttgggactaagcaaaggaggggacactacgtggctcccaattggccatgtgtggctggctctgtgcctgggaagtgtgtggagtatggatggggacccaccagagaaagcaagtggccctgcagtcccagaatgtaatttctggtgtaggcttggagagggtgcctatatgcatgcccaccatgcccaggagcaggctatgccacttcagggtctgcaggggcacctggcatatgggccagcctccttcgttggctgtgacctgggtggtggcctgtgcttgtgcccagtggtcccagggtagccctggggtcgtgcaggggagccgttttgggcagtggatgtgctctcgggtcctacagtacagcacagcctgggtgttttgctcaagcccagtgacctgcctgccttgtccttcccgggttcagtggcagggagagccaagggtgccccacattggtgacgagtcagtattttgcatggatctcatcacacgtgaccatgaaggacgagcaagcatgagctggcaccagccacccccttctccgcgtggagggtggtcacatgtcctccacctgtgcccccagatgatgagactggaggaagacttccattgggcccacttttcctgggccagtgtccatcagccaggtgctcagcccctggtgtactgaagctccagcctttcctggtgccccagtcttctgcactaagctgtggtgagcacatccgggttccactggatttttgtgcggggagggggttttctacgttgggtcaatgatgagaatcttatattgtcctgaagagaggtgatgacttaaaaatcatgctcaataggattacgctgaggcccagcctaggtgagaattttggaaggggattatgggatgctgaggtcctcagcaaggccactgtattttgggctagagacctggaggctctgaagggcatctggaggtggcccaacctgtctctgcgctcctccatgaggcagcccaggctccctgtgcagggttggtgttggtgctccggttctctggtgtggggaatgttggtggctccttcctgagccctcattctcaccttgtgtctttcagtgagctcttccacccaggagggccccttggcattgactggcataggtgagtggatcctgctggggtcattggtcatgagctagaccgtgtggggtccccgaggttcagccttcagtccacaagggttttctcggggagcagacctgaatttccacctgggagggaagggttctcctggagggtagtttttttgggaatctagcccaaggaggatgccttccctgaagccctgcaagggtgatggtggtccaggcaggagagggttccttctgcccaatgcaggacagctcccagttgagactgagtgctccagtaaggtctccaggactgcccaggccacatgaaggaggccagaggggctatggagcaccactggggtaataggggagctcttggtccctggagtgtggtgtgtgaatggggtttggtcacggagattcaaggatcacaccccacccatggccctgaaagtgaccatccctattgagcaatgggccatcccaccgggtctcctggagtctggtgcagggcgacgttttttccctggggttgggtcaaggtggagctctggtacctggtcatgctgcaggtcagccttgggactcgtaagctttgggccaagggacagctggcatcctgctggggggtcaccctatctctggggtcgaatgtcacgaagggtggcctcctgaggtgggaaggcccattgtcgagggacctgtcccaggattttgttgctcaggcttcttctgagccatggtatcacctccagggtgacagggtcttgggcccaagcaaaggagagggcaccatgtcgctctgagttggccaagtgtagcctagctctgtggtgggaggtgtgcagagcatggctggtgacccaccagagaaagcacgtggccctgcagccccaagctgtgatttccagtacatgcttagagagggcatcttgatgtgagcccaccacacccaggggcagactacgtgactgccaggactgcagtggcacatggcatctgggccagccttcttggttggccatgacctagctaatggccctggcccgtgccttggggtcatgcaggggagccctcttggacagtggaggtcctctcagggcctgcaatatggcgcaggctgggcatttggcccgagcccagtgacctacctgccctgtccttccagggttgggtggcagggagggacaagggtgccccatgtcagtgacaagtcagtatttcacatggatctcatcacatgtgcccatggaggacgagcaagcgggaactggcacccgctacttccttccctacatagaggccattttggacacatgttctccacctctctcccagatggtgagacgggaggaagacttgtgttgggcctgctgttcctgggccagtggccatcagcctgttgcccagcccctgaggcgctgaagctcaggcccttcctcacaccctggtctcctgcactagctgtggtgagcacatccgggtcccgctggatgcatgcaagaggtggttggtctcgtgggttgggtcgatgatgagaaccttatattttcctgaagagaggtgatgacttaaaaatcatgctcaataggattacgctgaggcccagcctaggtgagaactttggaagaggatgctgggatcctgagatcccaggcagggccactatattttggggtggagaactcaaggccctgaagggcctctcagggggtgccaccctgtctctgtgcccctctgtaaggcagcccaggctccctgtgtgggcttggtgtctggtctctggttccccgggggcggggcatgttggtggctccttcctgagcccgctttctcccccatgtctttcagtgagctcttctgcccaggtggggcccatggccttacacgacataggtgagtgtatcctgttggggtcatgggccatgaatgaggcagcatggggccatttagggtcagccttcgggccactagagttttctcagggtgcgaccggggagggaacatttctccagtagggtcacttccttggaaatctgatcctaggagcacgcatttcttgaagtcctgcaaaggtgatggtggtccagacaggagagggttccttcagcccaacatagcgcagctcccagctgaaactcggaaggctggtcaggcctcgaggactgcccaggccacatgaggtgggcaacaggggctctggggcaacctgggggtcacgctggagttctccctctctggacagtggtgggtgattgggcccacgcagacaggccccggagattcaggactgcaccccatccatggccctgaatgggaccgaccctgttgagtaatgggccatctcagtggtacctccttgagcctggtagggggagacactgtttcaatgcagttgaatcaaggctgagctctggctggtgcctggtggtgctgcaggcagccctgagggttgtggtctttgggacaaggggtagctcacatcccactggggtcaccccttccttgagattcagtggccaaaagggtgtcctcctgagatgggaagtcctgctgtcgagggacctgttctgggaatttgccacacaggctgcttctgagccacggggtcacctccagggtggtagggtcttgatcccaaggaaaggagaggacaccatgtggtttcttattgaccaagtgtggcctggctttgtgtgtgggaggtgtaacgcaagatgaggacccaccagagaaagcacgtggctctggaggcccccagggtttgatttccggtgtgtgcttggagagggcaccaggttgggcacccaccacgcccagggcaggctctgcgactgccaggtctgcattggctcctggtgtcagggccagactcattggttggccatgagcaggttggttgccctgacccatccccatggtcccagtgtggccctggggtttttcaggggagccggctcaagcagtggaggtgcgcttagggcctgcagtagggaacagcccaggcatcttgcctgagcccagtaacctgcttgccttgtctttccagggtttggtggccgggagggccaatgatgctctgcgtctgtgttggatcagtgttcttcatggattccatcacgtgggtatcccctacccaccttccccttgctcatacgtgaggccctggttggacacatgtccttctcctgtcaccccagatggtgagccttgaggaagacttgtattgggcccccacaggccccaggccagtgtccgtcagcctggtgctcacccccagtgtgctgaagctcagaccctccgtggcaccctggtctcctgcactgagctgtggtgagcacattcaggttccgctggatgcatgcatggagaggggcttgcccttggttgggtcagtgatgagaaccttctattgtcctgaagagaggtgatgacttaaaaatcatgctcaataggattacgctgaggcccaacctaggtgagtatgttggaagaagacactgggatcccgagatctccaacagggcactgtattttgggttggagacctggaggccctgaagggcatctggaaggaggcccaaccctgtctctgtgctcttccttggggcagcccaggctacctctgcgggcttggtgttggtgctccagttccctggggccagggaacattgctggctccttcctgagcccccattcctcccttgtgtctttcagtgaacttttcctcccagatgggccccctggcattgactggcataggtgagtgcatcctgctggggtcatgggccatcagccaggccatgtggggtcgctgaggttcagcctttgggccacaagggttttctcaggcagccgacctgaattcccacctgggagagacgggttctccaggagggcagcttttttgggaattagacccaaggaggatacctgaagccctgcaggggtgacggtggtccaggcaggaaagggttccatcagcccgggcaaggcagctcctagctgacactcggtgttcgggtcagtccttgaggactgcctgaacacgagggggtccagaggggctctgggtgccacgggggtcacatgggagctctcagtccctagagtgtggtgtgtgaatggacccttagggttaggtcttggagataaaaggattgtgctccacccatggcctggaatgtgaccgtccctgttgagtaatgggccattccagtgggtctcctggagcctgatgggaggtggcgttgtcttcctggggttgagtcaaggcagagctctggcccatacctggttgtgctgcaggtcagccctgggactcgtgggctttgggccgaggggcagcccgcatcccgctggagattaccctatctctgagatcaagcgtcatagagggtgacctcctgagaagggaaggcccactgtcgagggacctttcctaggattttgttgctcaggctgcttggaatccattgtgtcacctccagggtgatggaggtttgggcccaagcaatggagagggcaccatgtgtctcctgattgttcaagtgtgtcggagatatgcggggtatggatggtggcccaccaaagaaagcatgtgactcaagctgtgatttccagtgcatgcttagagagggcgcctgtatgcgtgccccacatgcccggggtaggctatgcaactgccaggtctgcagtggcgcatggcatcttggccagccttcttggttggccatgacctggctaatgaccctggcctgtgcccagtgatcccagggaagccctggtgtcatgcagcggaggcctcttgggcagtggaggtgctcttaaagcctgcagcatggcacggcctgggcatttatcccaagcccaatgaactacctgccctgtccttccagggttcggtggcaggcagggccaagggtgccccgtgttggtgacaagtcagtatttcacatggctctcatcacatgtgtccgtggaagataagcaagtgtgaactggcacgtcctacctccttccctacatggaggtaactttggacacatgttctccacctctctcccagatggtgagaccggaggaagacttgcattgggcctgttgttcctgggccagtggccatcagcctgttgcccagcccctgatgcgctgaagctcgggcccttcctcgcgccctggtctcctgcactgagctgtggtgagcacatccgggtcctgctggatgcatgcacgaggtgattgatcccctcagttgggtcgatgatgagaaccttatattgttctgaagagaggtgatgacttaaaaatcatgctcaataggattacgctgaggcccagcctaggtgagaattttggaagaggatgctgggatcccgagatccctggcagggccactatattttgggctggagaacttgaggccctgaagggcatctcaggggggtccaaccctatctctgtgcccctccatgaggcagcccaggctccctgtgtgggcatggtgtccgggctctggttccctgggggtggggcatgttggtggctccttcctgagcctgctttctcccccatgtctttcagtgagctcttctgcccaggtgaggcccatggccttaagcggcataggtgagtgtatcctgttggggtcatgggccatgaatgaggcagcatggggccatttatggtcagccttcgggccactagggttttctcagggtgcgaccggggagggaatgtttctccagtagggtcacttccttgggaatctgaccctaggagcatgcatttcgtgaagccctgcaaaggtgatggtggtcccggcaggaaagggttccttcagcccaacatagagcagctcccagctgaaactcagcgggctggtcaggcctcgaggactgcccaggccacatgaggtgggcaacaggggctctggggcaacctgggggtcacgctggagttctccctctctggacagtggtgggtgattgggcccacgcagacaggccccggagattcaggactgcaccccatccatggccctgaatgggaccgaccctgttgagtaatgggccatctcagtggtacctccttgagcctggtagggggaggcactgtttcaatgcagttgaatcaaggctgagctctggctggtgcctggtggtgctgcaggcagccctgggggttgtggtctttgggacaaggggccagctcacgtccctctggggtctccccttccttgagattcagtggccgaaaggatgtcctcctgaggtgggaagtcctgctgtcgagggacctgttctgggaatttgccacacaggctgcttctgagccacggggtcacctccagggtggtagggtcttgatcccaaggaaaggagaggacaccatgtggtttcttattgaccaagtgggacctggctctgtgtgtgggaggtgtagggcaagatgaggacccaccagagaaagtacgtggccctggaggcccccaggctttgatttctggtgtgtgcttggagagggcaccagggtgggcacccaccatgcccagggtaggctctgcaatggccaggtctgcattggctcctggtgttagggccagactcgctggttggccatgagcaggttggttgccctcacccgtccccatagtcccagtgcggccctggggttgttcgggggagccggcccgagcagtggaggtgctgttggggcctgcagtagggcatcttgccccagcccagtgacccaccttccctgtctttccaaggtttggtggccagcagggccaatggtgccctgtgtctgtgatgagtcagtgttcttcatggattccatcacatgggtatcccctacccacattcccctcgctcatatgtgaggccctggttggacacatgtccttctcctgtcaccaccccagatggtgagcctggaggaagacttgtattgggaccctacaggccccaggccagtgtctgtcagcctggtgctcatcccccagtgcgctgaagctcagaccctccctggcaccctggtctcctgcactgagctgtggtgagcacatccaggttctgctggatgcatgcatggggagggccttgattgggtcaatgatgagaaccttatattgtcctgaagagaggtgatgacttaaaaatcatgctcaataggattacgctgaggcccaggctaggtgagaattttggaagggagcgctgggatgccaagatccccggcagggccactagccactgtattttatactgaagaacttgaggccccaaagggcatctcaggggtcctagccctgtctctgtgcccctccgtgaggcagcccaggctccctgtgttgacttggtgtccaggctctgcttcctggggatagggcatgttggcagctccttcctgagcccacgttctcccctgtgtcttctattgagctcttctgcccaggtggggcccatgcccttaagcagtataggtgagtgtatcctgttgcggtcatgggccataaatgaggcagtgtggggtcatcgagggtcagccttcaggccactagcgttttctccaggtgcccccggggagggaacattgctccagtagggtcacttccttgggaatctgaccctaggagcacgcatttcctgaagccctgcaaaggtgatggtggtccaggcaggaaagcgttccttcagcccaacatacagcagctcccagctgaaatttggtgggctcgtcaggccttgaggactgcccaggcttcatgatgggggacacagaagctctggggctccctggggctcacactggagttctccctccctgaagagtggtgggtgattgggcccacagtcaggtggcggagattcaaggaatgcccccacccctggccctgaatgggaccaactctgttgagtaatgggccatcttaatggcgcctccttgagcctgttgggggtgggttgctgtttcaataaggttgagtcaaagctgagctctgactgggcgcctggtggtactgcaggccggcccttccttgggccaagggggcagcttgtgtcccgctggtgtcatcccttccttgaggtccagtggtggaaagggtagcctcctatggtgggaaggcctgctgctcagggacctgtcctggaaatttgccatccaggctgcttctgagccatggggtcacctccagggtagtggggtcttgagtccaagaaaaggagaggacaccatgtggttcctgattggccaaggctccttggttggccaggagcaggttggttgccctggcccatgccccatggtcctggtgtggccctggggttgttcaggggagctggcccaggccgtgaaggtgctctcagggcctgcagtagagtgcagcccaggcatcttgccccagcccagtgacccacttaccctgtctttctaaggtttggtggccaggagggccaatggtgccttgtgcccatgttgggtcagtgttctgcatggatccccatcatatgggtattccctacccaccctccctgcactgatatgtgaggccctggttggacacatgtcctcctcctgtcccttcagatggtgagtctggaggaagacttgtgttggacccccacaggccccaggccagtgtccatcagcctggtgctaatcccccagtgctctggagtttggaccctccctggcaccctggtctcctgcactgagctgtggtgagcacatggatgcatgcttggggtgggggttgcccttggttgggtcaatgatgagaaccttatattgtcctgaagagcggtgatgacttaaaaatcatgctcaataggattacgctgaggcccagcctaggtgagaattttggaagaggacactgggctccccggaatggccactgtattttgcgctggacacctgcaggccctgagggccatctggaaggtccaaccctgtctctctgctcctccaggaggcagcccaggctccctgagggggcttggtgtcgggctcctgttccccggggttggggccggttggtggctccttcctgagcccccattctccccttgtgtctttcagtgagctcttccacccgggcgggcccccggcattgactggcataggtgagtggatcctgcttgtgtcatgggccatgaaccggtccatgtggggtcaccaagggtcagcctttgggataagagggtttcctcagggaaccaacctgaattcccatcagagaggtatgggttctccaggagggccgcttttttgggaattggacccaaggaggataacttccctgatctctgcaggagtgacggtggtccaggcaggaaagagttccttcagccccacccagcgcagcgttctgttgagactcagtgctcaggtcaggcctggaggatttctcaggccatctgagggggttagaggggagctctttgtccatggagtgtggtgcttgaatctgcccttggggttgggtcatggagattcaaggatggtgcctcacccatggccctgattggaattgtccattgagaaatacgccattccagtgggcctcctggagcctgatggggggtggtgtttttttccctggggttgagtcgttgatggggactcaccatagaaagcatgtggctctggaggcccccaggctttgatttccagtgcctgcttggagtgggcaccagggccggcacccaccatgcccaagggcaggctctgcgactgccaggtctgcattggctcctggcatcaggaccagcctccttggttggccatcagctgcttggttgccctggcccatgccccgtggtcctggtgtggccctggggtggttgagtggagctggcccaggcagtggaggtgctcttggggcctgcagtagggtgcagcccaggcatcttgcctgatcccagtgacctgcttgccctgtctttccaggattttgtggcagggagggccaagggtgccctgcatccgtgatgggtcagtgttccacgtggatcccattacgtgggtccatagaggatgagcatgcgtgagccagcgcccccttcccacttcttctcatggagctgtgaggccctgtgtggacagctgtcttcctcttgtcccaccaggtggtgagcccggaggaggacttgcgttcggcccgctggtcccagtgtgtccggaattggtgggttcttggtctcactgacttcaagaatgaagctgcggaccctcgctgtgagtgttacagctcttaaggtggcatgtctggagtttgttccttctgatgttcggatgtgttcggagtttcttccttctggtgggtttgtggtctcgctggcttcaggagtgaagctgcagaccttcgcggtgagtgttacagctcataaaagcagtgtggacccaaagagtgagcagtagcaagatttattgcaaagagtgaaagaacaaagcttccacagtttggaaggggacccaagtgggttgccactgctggctggggcagcctgcttttattctcttatctggccccacacacatcctgctgattggtagagctgagtgatctgttttgacagggcgctgattggtgcgtttacaatccctgagctagacacaaaggttctccatgtccccactagattagctagatacagagtgttgacacaaaggttctccaagtccccaccggagtagctagatacagagtgtctattggtgcattcacaaaccctgagcttgacacagagtgctgattggtgtgtttgcaaaccttgagccagatacagagcgcggattggtgtatttacagtccctgagctagacataaaggttctccaaggccccaccagagaagctagatacagagtgtcgattggtgcattcacaaaccctgagctagacacagggtgctgattggtgtgtttacaaaccttgagctagatacagagtgccgattggtgtatttacaatccctgagctagacataaaggttctccaaggccccaccagactcaggagcccagctgtcttcacccagtggatcccgcactggggctgcaggtggagctgcctgccagtcctgcgccatgcgcccgcactcctcagcccttgtgtggttgatgggactgggcaccgtggagcagggggcggcactcgtcggggaggctctggctgcacaggagcccatggagggggtgggaggctcaggcatggcaggctgcaggtcccgagccctgccccgagggaaggcagctaaggcccggtgagaaatcaagtgcagcgccggtgggctggcactgctgggggacccagtataccctctgcagctgctggcccgggtgctaagcccctcattgcctggggccggcagggccggcccgctgctccgagtgtggggcccgccaagcccacacccacccggaactccagctggcccacaagcgccccgcgcagccccggttcccacttgcgcctctccctccacacctccctgcaagctgagggagcaggctccggccttggccagcccagaaaggggctcccacagtgcagcagtgggctgaagggctcctcaagtgccaccaaagtgggagcccaggcagaggaggcgccaagagcaagtgagggctgtgaggactgccagcacgctgtcacctttcatcaggacagtgtctgtcagccaggtgcacagcccttggtgtgctggagcttgggcttttcttggcagcctggtgtcctgcattgagcggtggtgagcttgtccaggtcccgctggttacctgcacggtgacgggggtgccctcggttaggttgatgatgagaaccttattttgtctcgaggagaggttatgtgatgggtgttgtggcagctctttgtatttcattttcttcagtgctttttgtgtgttctctttgtattttttaccgctttgtgtattttactttcacaaaggcagcagcaaatgttttattggtggtggtatttttcatttttatttacttcctaatttgatagtgttttagttggaatacacagtctcattgtagttgttcagaaatatgctttttttctgtacattatatgattgtgcataatttttgccagttttttttttaattggggactacagttgaatgcactgcctatctcctactttactgaaacagattgtatggaaatctaaagacgagaaagtagacaagcacagcagaggacatttattttgatataaccacagaaattcattgatatgaccttatcatattgatggtttttcaaagaaatataaaatctttcgataatggattgtctcagttgcgtttctccttatatcatgttttgccttcaatacaaattgcaatgcttagaaatttaaagaacaccttctgaagtggaagatctagctaaagaattagattggtattggctgaaatgttgcagtaatcacatgatagggttaatacaacatgagttacatgctgagtgctctaaggtagaaagtaggtaacaaggaataacaggtaggtaatgtaagtcgggagaaggaaactctaggacagaatcattagaaaaggcttgacgtcaacagcagtgtatagaatttacagtgtatagaatttacagtgcatagaatttacaataagtgcctttttttgtgctcatcaatgctcttgcttatattgtaggaggagttagttcccttgaagaaatatcaatacaaatttccaaattgcaatgcagagggaaaaaagaatgagaaagtaaaaaatatccaagaactctggaagcatttcaaaaagtgtaaaaatgcatagtgacaatgtcaggagaataaggagataaaggaaaagaaatatttgacacaacaatgacttgagcactttctaaaattaatgatggacagaaacccacatgttcaggaagctcagagagcactctgcagaataaaaatattttacaaatcgacacctttgcatttcatatttaaagtccagaaaatcatagactaagggaaaagcttgataggagcaataggaagaaaaccatcttacctatggagcaacaagaataaaaattgctttgaaattatcttcagaatccatgaaagcaagaagtgagtcagggtgaaatatttagtgttaaaagtaagaaacaaaaaaaagtaccaactttgaattttctgctcatcaaaattattcttcaaaagtgaaggagaaatactctctgagaccaacaaaaattgctagaacttcttgccactacaccaaccttttaataaacgtaacaagaaattcttcagaaaggataaaaatgacataggtcggaaaatctaatttacataaagaaatgaaaagcattggagaagaaatatatgaagaaaaattaaatatatatgtattttttgattcataattgatctttcaacaatttgttcaaaataataacaagattatatttggtgattataggttatggaaaagtgaaatgaatgacagcaatattataagtcatccggttccaagatggccgaataggaacagctccagtttacagctcccagtgtgagtgacgcagaagacagttgatttctgcatttccaactgacgtaccaggttcatctcactggggcttgttggacagtgggtgcagcccatggagtgtaagccgaagcaggacgaggcatcacctcacctgggaagtgcaagaggtcagggaattccctttcctagccaagggaagcgtgacagatggtacctggaaaattgggacactcccaccctaatactgtgcttttccaactgtcttagcaaacggcacaccaggagattatatcccgtgcctggcttggagggtcccacatccacggagccttgctcactgctagcacagtagtctgagatcaaactgcaaggcagcagtgaggctgggggaggggcatccaccattgctgaggcttgagtaggtaaacaaagcggctgggaagctcgaactgggtggagcccaccacagctcaaggaggcctgcctgcttccgtagactccacctctaggggcagggcatagcagaacaaaaggcaacagaaacttctgcagacttaaacatccctgacagctttgaagagagtagtggttctcccagtacagagtttcagatctgagaacagacaggctgcctccttaaatgggtccctgacccccaagtagcctaactgagagacacctcccagtaggggctgactgatacctcatacagctgggtgcccctctgagacgaagcttccagaggaaggatcaggcagcaacatttgccgttctgcaatatttgctgttttgcagcctccactggtgatacccaagcaaacagggtctggagtggacttccagcaaactccaacagacctgcagctgaggatcctgactgttagaaggaaaactaacaaagagaaaggacatccacaccaaaaccccatctgtacgtcaccatcatcaaagaccaaaggtagatgaaaccacaaagatggggagaaaccagagcagaaaaactgaaaattctaaaaatcagagcacctcttctcctccaaaggaatgcagctccctgccagcaatggaacaaagctggacggagaatgactttgacgagctgacagaagtaggcttcagatgatcgctaataacaaacttctctgagctaaaggatgaggttcaaacccatcgcaaagaagctaaaaaccttgaaaaaagattagatgagtggctaactagaataaacagcatagagaagaccttaaatgacctgatggagctgaaaccatggcacaagaactacgtcacacatgcacaagcttcagtagccgatttgatcaagtggaagaaagggtatcagtgattcaagatcaaatgaatgaaatgaagcaagaagagaagtttagagaaaaaagagtaaaaagaaacaaagcctaaaaaagtaaaaaagtaaaacaaagtaaaaaagaaacatgggactatgtgaaaacaccaaatctacgtctgattggtgtacttgaaagtgatggggagaatggaaccaagttggaaaacactctgcaggatattatccaggagaactcccccaacctaggaaggcaagccaacattcaagttcagaaaatacagagaatgccacaaagatactccttgagaagcgtaactccaagacacataattgacagatacaccaaagttgaaatgaaggaaaaaatattaagggaagccagagagaaaggtcaagttacccacaaagggaagcccatcaaactaacagcaaatctctcagcagaaactctacaagccagaagagagtgggggccaatattcaacattcttaaatgaaagaattttcaacccagaatttcatatccagccaaactaagcttcataattgaaggagaaataaaatactttacagacaagtaaatgctgagagattttgtcaccaccaggcctgccctacaagagctcctgaaggaagcactaagcatggaaaggaacaaccagtaccagccactgcaaaaacatgccaaattgtaaagatcactgatgctaggaagaaactgcgtcaactaacgagcaaaataaccagctaacatcacaatgacaggatcacattcacacataacaatattaaccttaaatgtaaatgggctaaattctccaattaaaagacacagactggcaaattggataaagagtcaagacccatcagtgtgctgtattcaggagacccatctcatgtgcagagacacacataggctccaaataaagggatggaggaagatctaccaagcaaatggaaaacaaaaaaaagcaggggttgcaatcctagtctctgatgaaacagactttaaaccaacaaagatcaaaagagacaaagaaggccattatgtaatagtaaaggggtcaattcaacaacaagagctaactatcctaaatatacatgcacccaatacaggagcacccagattcataaagtaagtccttacagacctacaaagagacttagactcccacacaataataatgggagactttaacaccccactgtcaacattagacagatcaacaagacagaaagttaacaaggatatccaggaattgaactcagctctacaccaagcagacctaatagacatctacagaactctccaccccaaatcaacagaatgtacattcttctcagcaccacatcgcacttattccaaaattgaccacatagttggaagtaaagcactcctcagcgaatgtaaaagaatagaaattataacaaactgtctctcagaccacagtgcaatcaaactagaactcaggattaagaaactcactcaaaaccactcaactacatggaaactgaaaaatctgctcctgaatgactactgggtacataatgaaatgaaggcagaaataaagatgttctttgaaaccaatgagaacaaagacacaacataccagaatctctgggacatatttaaagcagtgtgtagagagaaatttatagcactaaatgcccacaagagaaagcaggaaagatctaaaattgacaccctaacatcacaattaaaagaactagggaagcaagagccaacattttcaaaagctagcagaaggcaggaaataactaagattggagcagaactgaaggagatagagacacaaaaaacccttcaaaaaatcaatgaatccaggaactggttttttgaaaagataaacaaaattgatagaccactagcaagactaataaagaagaaaagagagaagaatccaatagatgcaataaaaaatgataaaggggatatcaccaccaatcccacagaaatacaaactaccatcagagaatactataaacatctctatgcaaataaactagaaaatctagaagaaatggataaattcctggacacatacaccctcccaagactaaaccaggaagaaggtgaatctctgaatagaccaataacaggctctgaaattgaggcaataattaatagcctaccaaccaaagaaagtccaggaccagagggattcacagctgaattctgccagaggtacaaagaggagctggtaccatgccttccgaaactattccagtcagtagaaaaatagggaatcctctctaactcattttataaggccagcatcatcctgataccaaagcctggcagagacacaacaaaaaagagaattttagaccaatatccctgatgaacatcgatgcaaaaatcttcaataaaatactggcaaaccgaatccagcaacacatcaaaagctaatccaccacgatcaagttggcttcatccctgggatgcaaggctggttcaacatacacaaatcaataaacataatccatcatataaacagaaccaaagacaaaaaccacatgattatctcaacagatgcagaaaaggcctcgacaaaattcaacagcgcttcatgctaaaaactctcactaaactaggtgttgatgggacgtatctcaaaataataagagctgtttatgacaaacccacagccaatgtcatactgaatgggcaaaaactggaagcattccctttgaaaactggcacaagacaggaatgccctctctcaccgctcctattcaacttagtgttggaagttctggccagggcaatcaggcaggagaaagaaataaagggtattcaattaggaaaagaggaagtcaaattgtccctgtttgcagatgacatgattgtatatttagaaaaccccatcgtctcagcccaaaatctccttaagctgataagcaacttcagcaaagtctcagaatacaaaatcaatgtgcaaaaatcacaagcattcctatacaccaataacagacaaacagagagtgaaatcatgagtgaactcccattcacaattgcttcaaagaataaaatacctaggaatccaacttacaagggatgtgaaggacctcttcaaggagaactacaaaccactgctcaacgaaataaaagaggacacaaacaaatggaagaacattccatgctcatggataggaagaatcagtatcgtgaaaatggccatactgcccaaggtaatttatagattcaatgccatccccatcaagctaccaatgactttcttcacagaattggaaaaaactactttaaagttcatatggaaccgaaaaagagcctgcattgccaagtcaatcctaagccaaaaggacaaagctggaggcatcacactacctgacttcaaactatactacgaggctacagtaaccaaaacagcatggtactggtaccaaaacagagatatagaccagtggaacagaacagacccctcagaaataataccacatgtctacaaccatctgatctttgacaaacctgacaaaaataagaaatggggaaaggattccctatttaataaatggtgctgagaaaactggctagccatatgtaaaaagctgaaactggatcccttccttacaccttatacaaaaattaattcaagatggattaaagacctaaatgttagacctaaaaccataaaaaccctagaagaaaacctaggcaataccattcaggacataggcatgggcaaggacttcatgactaaaacaccaaaagcaatggcaacaaaagccaaaataaacaaatgggatctaattaaactaaagagtttctacacagcaaaagaaactaccatcagagtgaacaggcaacctacagaatgggagaaaatttttacaatctactcatctgacaaagggctgatatccagaatctagaaagaagttaaacaaatttacaagaaaaaaatcaaccccatcaacaagtgggcaaaggatatgaacagacacttctcaaaagaagacatttatgcagccaaagacacatgaaaaaatgctcatcatcactggccatcagagaaatgcgaatcaaagccacaatgagatcccatctcacaccagttagaatggcaatcattaaaaagtcaggaaacaacaggtgctggacaggatgtggagaaataggaatacttttacactgttggtgggatggtaaactagttccaccattgtagaagacagtgtggcaattcctcaaggatctagaactagaaataccatttgtcccagccatcccattactgggtacatacccaaaggattatatatcatgctactataaagacacatgcacatgtatgttcattgtggcactattcacagtagcaaagacttggaaccaactcaaatgtccatcaacgatagactggattaagaaaatgtggcacatatacaccatggaatactttgcagccataaaaatggatgagttcaagtcttttgtagggacatggatgaagctggaaaccatcattctcagcaaactatcgcaaggacaaaaaaccaaacactgcatgttctcactcataggtgggaattgaacggtgagaacacttggacacagggtggggaacatcacacacgagtggctgccgtggggtggggggaggggggagggatagcattaggagatatacctaatgtaaatgacgagttaacgggtgcagcacaccaacatggcacatgtatacatatgtaacaaacctgcacgttttgcacatgtaccctagaacttaaagtatgaaatatatatatatatatatatatatagtcatgagggagagaaaatactcttagttacttggactaacccacgaagtaggacagtataatttgaaaaaggacttggattagttgtaaacgtataatgtaatatccagcacagccactaaaaatgattttgaaaaaagcagtataatcaatatactaacagaagaaaaagcagaatcaggccagacatggtgactcatgtctgtaatcccagcactttgggatgctgaggcaggaagatcacttgagccccggagttcaagtccagcctggcaacgaataagagcccatctctaccctccaccccccccaaaaaaaaaaagaaaaagaaaaagaggccgggcacggtggcttactcctgtaatcccagcactttgggaggccgaggtgggtggatcgcgaggtcaggagatcaagaccatcctgcctaacacggtgaaaccccgtctctactaaaaatacaaaaaaaaaaaaaaaatagctgggcatggtggcgggcgcctgtagtcccagctactcaggaggctgaggcaggagaatggtgtgaacctgggaggcagagcttgcagtgagccgagattgcgccactgcactccagcctgggagacagccgcaagattctgtctcaaaaaaacaacaacaacaacaaaaaaaaacaaaaacaaaaacaaagaaaacgaaaagaaaaagcagaatctttttttttttttttttttttttttttttgagatggagttttggtcttgttgcccgggctggagtgcaatggcacgatttcagctcaccacaacctccacctcccaggttcaagcaattctccgggctcagcctcccgaatagctgggattacaggtgtgcaccaccatgcctggctaattttttgtatgaaaaagcagaatcttatacaatgctcaattaaaatcagggagaggagaaaaagagtagaataccaaaaaagtaacaaattacaaggttgatataaatagaaaacaatcacaaatactgagtatactaatctaagtatatcaataatcactttaaacatcgcttaaaagacagagattgtcagtggattaagaacaagacccaaatatatgttgtctatgagaaatgcactttaaatagctgggcatggtggtgtgcacctgcagtccttaggaggccaaggcggagtgtcacctgagcccaggattttgggactacagtgagctatgatcatgccactgcactctagcctggttgacagaataagacctcatctctatagaaaaaagtaagtaaatctactttataaaggcacaaatatattcacagtaaaggaatagagaaagatatcccatgctaacattaatcaaaataaagtgaaatagccatattaatttcagacacaaccgactttagaacaaggaatattatcagagatcaaaagggacattccttaatgataaagggatcagttttctaagaagacataacaatccttaatgtgtacgcactgaacagcagatcatcaaagtacatgaagctaaatctgatagaactgcatagagaaatagataaattcactcttagagttggaggcattggcatccctctatcagaaatggacaggtttagcaagcagaaaatcagtaagggcataacatgatcaatcatgatcaaaaacttgattcagtcaactatatgtaactgacatctatggaccactttacccaacaacagcagatgacacattttctcacacacacatgaaacattcagcagaatagaccacattctgggctagaaaatgcacctcaacaaatttaaaagaatagaaatcatacaaagtatgttctcagactacaatggaatgaaagtaaacaaaaatcactaaaaaagatagctgaaaaacatgaaaatacttggaggttaaacaacagactgaaataactgaaggtcacagaagtctcaagataaatttttaaaatatttcaaactaaatggaattgaaagcacaacttatcaaaaatttaggaacgcaacaaaggcagtgcctactgggaaatttataccactgaatgtatgttaaaaagaacaaagatctaaataaataatccttcccattggaaagctagggggaaaattcaaattaaattcaaagtaagcaagtaaaagaaataataaaatatgaatacaattctgagtggcctgatatctgatttctggaagctgagttttatgtggctttagaagtttcatgttatgagtgtgaaatggcaagtgaccatggcgattgcttctgatatggccacctcaattacatagagaagggatgatcagtggcatcatcccagttctgcatgataccacaccagtgattctccaaagtcaagaaacctgtatatgttgtccttgtgtttggtgaatctgtggtctatagactacataatgggctatttctggggtactgaccattttgctccattaaggaaaaccatgcatgagccatataactatgggaaacaatgttttcctttttgacacctggcctactctcttcttaggtgagagcaaaggaagagcaccacttggcctgctgcacccagggcaatttataccatccagatatccagcactgaatatgtagcaactccaatccaccatagaacattaatctatctctgataagcatgctaatatctatgattctgcctttgtggggagatgactccatagattaaccccctggcttggggcaatatggagatgttatattgtcttcgacagggaagatgacataaaaattatgttcaataggattatgtggagacttaacataagtgacaaacctaagacaagaagttagaaatccttgtttcttttaggtgaataattttggagcttgagaaaaagacaccattgtggcgaacttgctttgccaaaccctgtgtatgcatttttgggtaaacaacacattttcatcctttaagcattgtttccattatttataattcctaatagtatgagacatttaggactcattccttggttcttcttctctcattgtatctttcattgtatctttcagtgctgcaagagatgcaatcatcccattaatgaaagcagagtgactgccttcgtcacacatacattcaaaatagatcactaggctagtgatgattctctcttaaggctattatgtttactcatttaaaaaatctggatctcagtatagattttcttctcagtgagtgactgacctatctgatatgatgctatgacaaaatctttactttttacctgaatttggtgggattgaaagttgagaacatattaatttattttctgtttcacttgattaataatgcccaatctaacatgcagtgttcacttgggtacatatatacaactacatcaaattttttcttgttttaccttaaaagtgttaagatattgtaatggtatggccagtttactcactggtaaacttttcataacagaaatatcatgccagtggacacaaatatgtaacatcagtaatttgctttcctcatgaaacagagaactgaataagttgatgggtaaactagtatctgaattataaaccccaaatatcatgtgacttcatcattttcagtataatgaaaatacaggctgtgaatgcttccagttggtcctgaaagggcctttgaggtgagtaggttcaccaaagcggcaacatatgtgtcccagtgggcattctactcctcagtaagtgacttgacattctttatggcttcctcatgattaaaacaagtctttttattgaaattttactgaaataatgatgaaacaatgtaatattcttttcatctacatataagagtagacatagattaacctctaccttttttttttttttttttgagacggagtctcgctctgttgcccaggctagagtacagtggtgcgatctcagctcattgcaacctctgcctcccaggttcaagcgattctcctgcctcagcctcctgagtagctgggattacaggcacgtgctaccattcctggctaatttttttgtaattttagtagagacatggtttcaccatgttggtcaggctgttcttgaactcctgaccttgtgatctgcccacctctgcctcccaaagtgctgggattacaggcttgagcccccgtgcctggccttcacctctacctattataatattttcatgttattccattttgtcatgtttgtgggtcatttgatgagggttcacaatatgaaaactgggcattttggccaagatgcatgtaaatgaatacaactccatgtgccctgataactgatttctagatcctgagatgcaagtggcttccagagtgtctgtattttatgaaagttcatatacagtaaaccatgctaattgttactgatacagcttccttgaatatataaagcgatgattaatgggatgttttgtttctgcagaaaaccactgaattgcttctccaaagccaagtgacctgtatgatttgtccttattatattttgtgaaccagtggactaaaacctttataatgggtcatttttttagtattgtcaatattgctcaattaacaaacatgactcatatacacaggtgagatgtagttctccctttgacatttgctctacatctgtcccttagatgatgatatggaagaaaagcactctttggcctgttgtgactgggacagttgacagcacccaggtgtcctttaatgaaaatgctcttgacaccaatgcatcctagcatcacagcttcaggaagccttctcaagtgtgcatggggagtactatgtctttcatcaataatgaaatcttctgatttggtgagaaataatgccttaaaattacactcaataggattatgctgaggctcagcctacctagatgaaaatgctgaaacagataatagtgacttcttatttcccttcaaggggaattttattttgaacttgaaataacaaaatctttatgggtaacttgtttgcccaactgtatcagtgcacctataaatgaacaaaaaattctcagcctataagctttgcttcagtgacctttaatttctaatagtaaggtatattcaggtctcattctttggctttttctcttattgtgtatttcagtaagacatgctgccaagagatgtgccattctattataaaagatcagtagcttcctttaccgacgtgtatattctatctagaacattgagctatggaagactcccacctaagggaattagttttacaccttcaggtaatctgaacttcaatatgagttttgctttatgatataatccttatgacaaaatctttactttttatctgaacttcatacaatcaatattgaagattttttaaattcactgttacctagtccaatatttaatatacatttggctgtagatacatgactagacaaaaattttttatattattattgtgggggctctaacagtgtttcactgttttgagttactgatgaactttctgtaactgtgagaccatggtaatggaagagaccgtggtaatggggaggagaatgtgaggatcagtatgtactttgcctataaaacttaaatatttagtaatttgatcaccaaattgatactcaaatttcagttcctatcatgtgtaaaccaaaaagtatctgagatttagaagtttatttagaagtggattttgccaaggttaagcacatgctcagaagaaataaacccaaaatcacagaaaccgtctggggtctatgtctttctccaaagatgattttgagggcttcagtgtttaaaggggaaaagtgggctggagggggaaaagggagggtatgataatccgtatgttccaagacaaaaggagcaggtaggggtatagtcaataatgtattcatctcatgctcagtaaatcagcactttacataagataaggtgaacatagagaagctacctgtggagatctttaacctttaatctgtagctatctgcttaagatcaaaaggaaattcttgcatgactcagctttcagcttattttttttttctcttggcgtagtaaattggggtcccaagtttattttcctttcacacatgtgaccccactattttcagaataatgaaagcacatgttagaaatgatgacacttattcctaatatggactttgaaatgactgggttcacaaatttagaatcatggatctcattataggtttttattttcaatgagtgactggcctacttgatggaattctttcaaaaaatgttcactttttactgagattatattaaaataatgttggaatgtgttcagtcatgtttaccatctctatagtatgatatatgataatatcgcagattactcagtgtcaaaaacctggcataccttgtccttatgatgttgatgagtcaatggtctagagccttagtaatatgtctttttgtggtagtacggaccgtatctgtccactaagaaatagcctgtgtaagccatatacacatgaacaatttatgtctgattttgaactatggtcccattcctatgcctgtagataaagactgctgagaagagcaccctctggtgttgtcacagaggcaagtgctaccgcacaggcatgctgcagtgaatttaactgatcctctgtccctgcaaccgttgtttaaggatgctattctggtaagggtttacaagacaacgtaaatatatgtataaagagtatcttcaggagacgtaataatgtaaaaatcatgctcaatagaattaagctgaggctcaaaatagtgccaatccttgcaagaaggtgtgagaagtcattagatttggggggtatgggttattccattttgaacttggtaggaagaaacccttgggggaatcttacatcatttgcctctacctacttctaaaggaacttttaaaattcttttatcttgtctttattcttaatactcatacattattagagagaatatcttggtttattttttcctcatggtgtgcttcagaatgttcatccagcaagaggtgtgtcattacacggattatatatatgagttctgtctttcgtaattaaaaaatttcaagtggaccatttgaatattaaacattggccttcaaaatgattacatttacctgttcatacaaaattagtgagcaatgatctattctttccaatgagtgactgatctaatgaggtcctcattaaaactccttttttttttttttttttttttgcctgaacgtactttgatttaaagatgtgacatttagtaattcattgcaatcaactctttagtgattgcacaaatagacaatccttttctattattttattttttggttgctgtgtatggtgttatgatgtttgtggatcattgaggcactactcacaactgaaagactttggcaattttagggaatggcttgagattcagctataggttacccttgattgaaattgaatacaatacaggtagtctgaaatctcatttccttatcctgagtctcactcaggtgtcattagattcattataaagaaatgcatacactatgtatgatgccagttgttactgatatgaagacgataagaagcttttatttctgcagggaaataatcccttaccaggtcatcaaaagacatgatacctatgtgcttggcccttactgtacacggggaatcagtggtctaccacagcttaagtaacgggtcatatttggagtatcacacatctcagtcttgtagaaattaggaacagcaattaggagtcatgcacatataagagatgtaatcccaccctttgactatagcctactcttgtcttttacagaaaagactgtggaggaagaaaaccctttaccctgttgttcagggagaaactgacaccactcaactgcctggcactgaaaatgtggcatccagtccactttaccatcagtgtttaaggaaaccatctctggtaagcatatttgatccaagtgtgcatatgcacatgagtgccatgggctgggtcaatgatgagatgttaccttgaagagaaatgatgacgtaaaaattaagttcagttggattacgctgaggcccagcctaggtaacaattgtgagacaagaagtttggatttcttagtttccttccattggggactttattttgggattctggcaatggaatcttattgcgaaacttgttttgcacgcttctatctgtgtgcttctaagtaaactataaattctgattctttaagtgctatttaagtttcctacaattcctaattttcttggatatttggcactaagacccttgctctttttctctcattggatgatttagtaagtcctactggcactattctattgagtggaggtgagaggctgcctttgctgactgaaaaatttcaaatagataattgaactagtgaagactgagctctataataattagatttattcattcagacaacatgaatatcacgatagggttttcttctcaatgattgactgacacatgtgatgcaatcctcatgagaaaatccttacttttgccctacgattgattgttttcagggttgagaaatatgatacattggaattttgctcaatgcgctacagttatcgtggtctaaatatacagacaaaattttctgtaatgttagtataatattttaacagtgctaggatatgttttgatcattaatgaatctttatgacttaagggtccttgcaattgggataaaaatgtgagtttcaataatatgtgtttgcccatgaaacttgaaattagataaattgatgagcaatctggtgcctgacttttctttctcaagtacctttggcttcgttttcattatgatgaaagtgtgtgctgtgaataatgccaatggtaaataagacctttatggacacttatatgaatgacagtcagggccgttccttcaggccacatgattatcgttatgcattcttcttctcaatgagtgactagcatacttgccaggatctacaagagggaaactttattttttactaaaattgcatcgatataatgttgacaagttttgtgattattggtatcatctctaagatgtgatgctcatttggtctaaatatagaagttaacatattaacttctaatttatatatgtcaggttgctatgtttttacaatgtttgtggtttattgatgatgactcacaacataaagactatggcattatggctacatgttctaattctgatatatacatatcccatcattcattaaattaaatacaattatgagtagtatgatgtctgttttctaaaatctgagtttcacctggctccagtatgatcattatatgatggagtgcaagcaacatgttaatgccaattgttattgatatggcttccttgaatatgtaaacaagactgatcaattgaaggtcttatttctgcattaaactacctgagatattctccaaattcaagagacctgtatagttagtctttattctgtttgatgaataaatggcctatagcctatctaatggatcagtttttccagtactaatcatatctcttcattaagaaatagcatgcataagccatacatacaggaggtaatatttgtcatcttgatctactgtcttatcctcctccccttagataaggatgactgaggaagagtactctttggcttgttgacaccagcacagctgacacacccagatatctgtttggtctcctgtgaactttcaaccaggatttaaggatgccactctggtaggtattttcagacaaagtgaatatgtgattgtagagttccatggcttgtttcaacaataagaccttatgttgtcttgaggacatgagatgacatgaaaactagactggctggtccttatcttttctggggtattctagtttgagcttaagataaagaaatatatttgggatatagtttctctcacctgtttctattagcttctagaagaccacttatcaattctttcctcctgatttagtggaaaacattttggcagttcctcaaaaagttaaagataaaattaccatgtaacccaacaattctgctcctaagtacacactcaaaagaattgaatacaaatgttcaaatgaatacatacacatgaatgttcatagcagcactattcactggctggagttccagaccagcctggccaacgtggcaagaccctgtctctactaaaaatagaaaaattagctgggcatggttgctcacgcttgtagtctcagctactcaggaggctgaggcacaagaatcacttgaacccaggaggcagaggctgcagtgagctgagatcacaccattgcactccagcatgggtgacaagtgagattctgtctcaaaaaaaaaaaagtgaaggtatgatgacaatgtcacacaaaatagtgaataccaataaaaagatagaaattattaaaaagaaccaaatgaaaattctggagttgaaaagtacaataactaaaatttaaaaatttattagaaaggctcaatagtagatttgaactgggagaagaaacaagaagtaaacttgaagatagaacaatagagattatgttcaaaagaacagaaagcataaagaataaagaaacaaagagagtctcagagaatgtggaacatcattaagcataccagcatacacatatgggagtaccagacaggcaggggagatacaaaggatcagaaaaaaatatttgaaggaataatggctgaaacctcccatatttgtggaaaacaataactgacatatccaggaagctcaatgaattccaatgaataaatgcaaagattgacaaatggaaacatcacagtaagatatctgaaagtcaaaaacaagaagaaagtcttgaaagcagtgtgagaaaaatgatttgttacttacaagggaaccccaggaagattaacagctgacttcagcagaagcaatggaggccagaagcaaaggcataacatattaaaaatgctcaaagaaaaaagaacctgtcacctaagaattctgtacctggcaaagctgtctttcaaaaatgaaggcaaaataaagacttcctcaattaaaaaaaaaaaagttggagaatctactgctctcaaaacccccttaaaagagttctctaaatacttaaagaagttattcaagctgaaagcaagtgagcctaggtagttattcaaatcaacaactacaaagcaaatgcttgtaaaggtaattatataaatataaaagacagtagaaatgtaatttttctctgaagtgattttaaaataaattctataaaataatatgtatataatgtattttggggtctataacatataaaagtgtaatatatttgccaaagaagataggtggatgcaaagcaatacaagactaaggaaatgactacagatggtagattaatatttattataatgtctttcttggcttatagcatcaataaatgtaatatgtataataataccacaaaagatggcaaaaagggaatagagctatataggtgtaacatttctgtataagactgaaattaagctagtgtaaattagaaacttatttgggtgagttaagatatatgcagtaaaccctagagcaaccactgaaaaaattcaaaacatatagtgaaaaaaattattaaggaagtttaaatgctacattataaaataattacttaatgaaaaagaagtaaagaggaatagaggaacaaaaacacatgagacacagaggagaagaagaatgacataataaactcaactaaataataaaattacatgtgaatacagtaaatatgtaaattaaaaggcagagattcccaggctggataaaatctccaggtttaatatccctttgccccaaataaactccagctttttttcctatgatgtatttgatcattgtgctggtttacaaaagatttctaacctttctaaaatctttaaaatcagcggcgaagtgttctatctcatttcacccatatatatcagagactcaaatcctgaaaaataccaagttgacctgcccattcttgagttctgctgaatggtgtgttcccagatcactatggatattgctgtttacttgaccaattacttttagtcaacaagatttgaacaatgcttttgattcacacagcgtgagacctagacttccctcatattgaaataggagcattagcatcctggattcctgcaccggcttttgaaccttatgtttcctgcaccccaagaagccatgttatctggacattgtcctctctgtgatgggaaagaagagttttttcaacaaatgttgctaggacaactggatatctagatacaaaagatactgcatttatgttaccagttttctgtgtcagtccattttgctctgatgtaacagaatactgcagactgggtatttgtaatgagtggaaacttattggctcacatttctggaggctggaaagatcaaggggctggcatatgataagggccttctcactctgtcatcctatggtagaagggcaaagagagggtatggatgggacaaatatcttcttttataggaacccacccctgaaataacagcattaatccattgatgagggcagagctctcacagcctaatcaccttttttttttttttttgagacggagtctcgctctttcgcccaggcgagagtgcagtggtgctatctcggctcactgcaggctccgcctcccgggttcacgccattctcctgcctcagcctcccgagtagctgggactataggcgcccgccacggcggccggctaattttttgtatttttagtagagacggggtttcaccgtgttagccaggatggtctcattctcctgacctcgcgatccgcccgccttggcctcccaaagccctgggatcacaggcgtgagccaccgcgcccggccgcctaatcaccttttaaatgttgctttattaaacactgttgcattgagggttacgtttccaagacaggcttttgaagtgaaatgaaaaatttgaccattcccaattatagtttgaaatttcaatgctcctttcttagtatgtgattgaacatggataagataatcagtaacggtggatgtaagaacactattaaccaacttgactccactgtcatatgtagaacacaacacccaacaatagcagaatgcacattatattcaagtgctcataaagcattattttgtatatatgtattttctcccttttttgataaagttagctagtagagtgcctatgtagttaatattttttaaaaaccacaggcttctcaattattaattacatctatggtttttaaaatattatcttcattaatttctgctttgatccttattcctttctttcttgtactttcttttatttttgttcttttttagtgttttaagatgaaaattgaattgtttcattcatctttttcattttttaaaataaaaacatttagtgcaatgaattttcctctagaactgcctttaaatgcatattacagattctcatatgttgtatattttaaaataatatgtaaatatatatttgcatagaaaaacatatttacatacaaaatatgtatttacatatttaaacatatgtattttctgtttatatttttccttttactcaggagttaataggatatttttaaaatttcttggtgaaagcgcctttatcttattgttagtaaagtctatgtttttgcattgtgatcagatagtgcagtttttaatatttcttgagttactaatttttctttccaacctaatatataatcagttttttgtgactatgccatgggcacttaagaacaacacagatcttctattatctgtcaagtttaatatgtagccataaaatctaccttatttttatgttgctatttttgcccacttgatctgtctttttctgataatggtgtattatagttttctattatgggatcatctatgtcttgtctccttacatctcatacatctcatgcagttttttattcataaaggtggttattatgttatttggtatataagtctccataagggtcaaatcttcatgtgtattatatcttttagcataaaaaaagtgtccttctttgccttgattaacatggtgggacttgaatacattgtgtgatataagaattactacgcttgcatgcgattggcatgaaaaaaaaaaagattactcctatctctttttgttttcatgtgcctgatatactttcgcccatccctttattttcagtcttttagaatccatttgttttagattcatctctcatagaaaacatattatgttttattttgtgagcccactgaaaatatttttcttctagtaggtgtgtggagtccactcacgtgtgtgtgtgtgtgtgtgtgtgtgtgtgtgtagctatgactgatatttattgtgtttgtattttctttatatttgctacgctcttttgtcacggtgtagtctttgcttgcctatttattcatacttaggagagtttttgtttttgttggagtgtttacttttgtacctctcttaattctgttagttctgtgttttcctagttaatcttttacttctgatttatcagtttgggggatgttcttcagcactcccctattctcatgcaaagtgctttcggttttcctctttttttttttttcctcctcctgtgtttagttgtcttatttctactttgtcacaatattagtgacatttgtatgctagtcttctaccctggatagggaatatacacctgtcagatggaaggaatatcatgttgtatgctgctgtcaaatagatcctaacatactttaataatcttttaaatgatataatccaagttcatagttaactcctgactttttatttctatcatattcagtagatatatcagcattgacagccatcccactgcaatatcacttcacattttgcttagaccaaagggttctgagaagcttctggagctgttgtgaaagccagtttcattaaagtcaagtcagacatccacctgtgctgttttctgctataagctgaatgcaggggatacaatgttaggagcatcagtgtggtatgaggaatgtttacttattggtagtagacttgtctggatcaaggataagtacaagtatctgagatgctgaggtgtggctgaatgaatggccatctgttctattgcaacaggataaataacacattcggagcaggcctaactggtgaactcctcaattatctcacaatagcactatcacgtgtctttcatttttcacagcacagtgtattttcataaaatctttattggtagaccacaactttagcatttcccattcaagatacaactactgtgtcacttggatagcttggtagagaggaaattggctattttcagagtaaagaattcaaggaggaaacagattataaatgaaatgacaaaggtgatgagatcaagcaatgctgacgtttgtagcaaggagtagagggctgagatgcctgtatgataagaaattataatggaaccaatcttgtgctttattttttattaatttggagcattctctgatctgatttattttctatgtgatattttgctgcaggttaaaagctgaaacaacttcaaggaaacttcagggaaaagaggtgagcagccactttggtacttttgaaattctttgttctgtgggcaatgatgtcagaatgtcaaagactgtgagttcattatttcagaggcttaaaggagattattcttttggtagatatatttccccatgggtgtccctaccttgttcaaggattccttattattgtttcttctctttgtttaaatctctttttgagatgacctaaacaactgtggagaatcattgatatatttccttttttcactgttcatgttgggtgaaaataatcttgtagtgaaattcacatgttctaaatattgtttttttacatctttatctggcacattcataacatagatgtttctatacatattagtactgtaatcataccatatattattctgttaccccacttactccttaaacttttagttaattaaagagtttttataaagtcccccaatagattttttttttttgagacatagtctcactctgttgcccaggctggagtgcagtggcgtgattttggctcactgcaacctccccatcctgggttcaagcaattctcctgcctcagcctgccaagtagctgggattacaggtgcctgccaccacgcccgactaatttttgtattttcagtagtgacagggtttcaccatcttggccaggctggtcttgaactcctgacctcgtgatccacccgccttggcctctcagagtgctaggattacaggcttgagccactgcacccggccagattttaatctaattttattagaacaattcagtcatatgttttttcatgctatgtatatgagagttccattattcagatactaaacaaatgtctactgtacatttactgttctcactgatgatgcattagataaccatgcacaaaataagcctggctgtggaaacgcttatttgttgggagggtgcttgtttggatcgatgatgagaataattgtctgaggatgctgagggactcattccagatgtcaatctgaggtccagatgtgcggccctccaataggacaaataagactctcagagcctggctctatttggggatccctcagtgacaacatagtacccctgtgagcgtgccttttctatctcttcgaagagggcagtggcatcctgtcttatgagtcagtgtgcactttagtgtgcctagtgacccaagacttgctttaattgtagatagatacttacatataggaaatatttcttaagtaacaaatgaaaaactttagaagattgaattaagggtcaagcaactgtgatatgtctgaaaatctcattagtgttgtgctgaaagaaggaaatatggcatgcctctattaaataatgacagtggaaccaagtttattgctttgttatttttactgtggagtattttctaagattatttttgctttttttttctttcatgttttgctgagatagaaggcctggaatctgatcctccacttcagagaacaggggtgagtagctaagccattatcttttgaaattcatatgtcatgtgctctttgctaggtctttaggtcgttttgtacatcttttcagaagcttattggaggacattttcatgatatgtccttttcctcattgagaccctcaccatgtcacctacactattgaatccttatcatttctcttttaattttaactctcttttgcttttatggaaaaatgtagaatttaagagaatttttggcaatttcatattggatcaaaatgtattgtagtgaaatccaggtgtgccaaaatattaacagattttccccatctgtttaattattggggtttcagaatagagactccatggttcataatatctttgtggtcatactacattatatttctgcttctaatttaattattaaatattgacttgaattagtcttttcctcattgttgcaacaaggtaagttatataggaaattttcttctcttgatggcatgtctgagataatcatagatataagacacctggctggtttctagaatgcatgtaatttttatttcttgatctgtgtgttgagtacttgctgtgattgcatcatgcaaatacattgagctttacaattttagtgtatgcacttttctacatgtatattattcttcgatagaaagtaaaaaaaacttatcgaactagtcaaaatattggttaatacataaaaaaagtctcaagtagattgtgtattacatggtgcttgttgattgatgccctcataatagatcaagtgggttctctctttagcacagggctttttagcaaatcatgtcatgagtagttactcaagtatttttattttaacacatttatattttttctatgtatattcttaaattctcttatacttttttctctgttataaaaacatgctgaacaatctcaagtcttaaggattgcagtattgtccccacatattcatgtattttggtactcaattctttatactttctttgacagatcacttgaactggcacatgtctcttgttttgcagagagggaattaatgtgataccttcatgcttttctattctatgtgctacataattgaatatacaagcaaatatagttgttaagatttagtgtgattatttctacaccacatgcaaagaagtttctcatagatcttaatagaggcccacatgcattgtacagtttagaatttggggaaatattgatgaagttgggtaaagtataaagccaaaagtcagaacagtgaactccttgcttaaggatttccttggagattacttagtcaatacacaactgataaatttaagtgcttttcaccttttgagttctcgacatactaaagctaaaatgtgtttcaacttttaatcctgcttccctgattttcccttttttagtctgagatcaaagagtttcagccataaattactgccaagagtaatcacttcattttaagaaagcttaacaatatagaagaatataaaattatttatgacagatgtatttttaaccttttccccatgctttccagaggaaatatgtttaatcatctgccctatattagggaaaaactttctatgctaatacaagtatctatcaatccatttatctttctatataagatgtattgatcataaccaattaactttactgtaaatgagctttagatttgacattttggtagtaatatatgttgtacaatctcctgaggtcctataggtcttgaggtctctatgtcaaaaactatagatgtgccagtgtcctcagtgaatgtgaaggacaccacattttccttagccatttcttgttttcagaataatggttatcaacattttgctactgcaagataccatacatttataatcggaatatgccagtttttatgcactcatgcctctgtttctgtagagcattcccagaatgagtaatgcttgaaaattaggtccatgtgatttctttaatgagttatagtcaaatcatgaaatattcaggttaccattatttcagtaatgtattagaatgtcaaggtaaagttatctacattgtatatatacacacaacatagatataatttatacaacatctatatttatacaacagatatatatttatgtatatatttatacaacataaaatatattttattatttaaacataaaatatattttattatttaatatagattcttaagtgataaatatgtttaatattattaaaataggttaaaataggttatagttagtacagtgaaaattggcagcccttttacaaaacatatgccataactatagcatttatcactgacagtcataccaggatagtcttttatttccaatcacttaaatattcctaattgcaaaagaaatttgaagactaaaattcagaagttttgaaagagccattgcctgggtaaactatacaggtttcagttttatttataataattatgaggccaggcgcagtggctcacacctgtaatcccaacactttgggaggccgaggcgggtggatcacgaggtcaggagatcgagaccatcctggctaacacggtgaaaccccatctctactaaaaatacaaaaaattagccgggcgtggtggcgggcgcctgtagtcccagctactcgggaggctgaggcaggagaatggcgtgaacctggtaggcggagcttgcagtgagccgagatcgcgccactgccctccagcctgggagacagtgcgagactccgtctcaaaaaaaaaaattatgtatatatttataaattaatacttaataaattaataacttgtgataggcaatgcaaagatgacagtaaaaggacaaaattgattagattgataaagtcctgttaacatgaagaaattgaccaggataccatccacactataaagttagagaaatttatcaggacaattccctaaaatactcttctcaattttaacattgtaacaggaatttttaaaattttggtattatgtgtgtttccttccagataatttgaacagattcatatttggtatttttaaaagccatatctttgtccttagtgctggcaatgtattcttgagaatgaacaaataagagatacgtaaaagcataagagaaggtatcaggttgaagtagtcaatcagttatacagaacacaaagaattttatcttgtataatgtttatatagctttatagaagtgtgctgaaagggctataaaacatggacattattatctcattgaaaggtccaatacgtactgaaatacatgcttttattttgaaccaaccaccctataaacgttgtatggcttatttagatgagagcccaggttgtgtgtgtctgtgtgtgtgtgtgtgtgtgtgtgtgtgtgtgtgtgtgtgtgtgtacctgacagggaagcaagaacatcgagttgccaatgcactctgtctatggttagaatcatgctgaaaacatggctcccccagttctggaatgagcccacagatcaagcattccccaaagacatagcaggctcaaatccctgtgtacacaatattttatgattatcttatgtcagtactttcaaagtatacagtttgtgtgaagacaaatccaatgtcatttttcttggctagcctatatgtgtggtaaatccattatttacttacttgcttcctgaaaattacaattagattaacaaactgcagcaaagtgggcatgatgagatagagattgaagtgtaagcttatgttaatgatgcccttggtttggataaacacatctaagagaaaaatggaaaaacacacatggcagggaagccttgatagagccaaaatataggattgtatgtagtaatgcaatccatagatgagcatttggcagtaatattatttttcagatatggataaaaattgcttaggagagtaaagagagacaaagttgaaagcaggtttatagtaggtgttgttttagtgttgatccctttttgctccaataatcaaagtgataaatattgaaaattgattcatgcagcattacttactccattctaatttttatatatgtcaaaagtgccatctcccaaactgtgctatccccttcaggagaagagactctgctgaagtttataaggttgacatattgccagcttcaataatgtaaagatgaagtgtatactgaattcttaatgcaaataacaactctattggaaagtaacccagttatagaagtgctaatttgtcaggagctgccttaccaagatcatgatgagtacagttatctcaggattctgaaagattgttttccgatttcaactagtctagctgaatgttccttgatagaaagagaggacttttagaattggttcaatatgatgacctcctgaattatctcacatagcccgtttgtacatgcctttcttttctctcagaaaatggcactatcataatagctttcttacacagacttcaccttagggttttacattaagggaggggtctggtgtttcatttattttgaagtatttgttgttgattgtgtacagtgcttgagtaaaaaattgaatatagaaacatctagaatatttttttaaaggatcagtgtttataaagtgaattattagtgtcaataatgttgggaaagttttaagagaatataggaaacttgaacattacacaactacaatgggaccaaattgtggggtctcattatagttaatatttatgtatttttttccaattgatttgtgtgctttttttctgcatgtttttggcagatagaatggctataacaagtaacagcatgtcaggtaataaaaataagcagagccctattcctttaaaaatcttcactgatgggagggccataaaataagtcttaatacatttaaagaattaaattcatgtaaaccatgttaatttaattccacaatgatattgaattagaaataagaggaatatctcttgaacatctcctaaatgtttggaaatttaaattagcatttctgacctatttattggttaaaaaagatacaaagaaaggaaaattgaaaagtcttttgaactgaataaaaataaaaatatagaatctaaaactttatgggatactgacaaaacaggatatagggaataatttatagcactgaaatgcctatattagaaaagaaaaaaggttttaaatcagtaaatttgtattttaccttaagaaacttagaaaagaacaaattaacccagacttaagtaaaataaaggcactaataaagataagagcagaaatcaatgaaatataaaacaacaaaacacagagaaaaattgagaaaatttaaaaatagcctagtgagaagatattgataaacttgtaaccagaccaatttaagaaaaaaagtcaaaacacaaataccaatatttgaaaatgtaggagggcaaatcattacagattctatgaatactaaaatgataataaggaaaaattatttaaaaggggcatgtcagccaggcatggtggcttacccctgtaatcccagcactttggcaggccgaggtgggaggattgctagagctcaggcattcgagaccagcctgggcaacatgttgaaaccttgtctacacaaaaagtacaaaaattagctgggtgtggtgttgcacacttgtagtcccagtcacttgggaggctgaggcgagaggatcacttgagcccaggaggttgaggctgcagtgagccatgtttgtaccactgccctccagcctgggtgacaaagtaagaccctatgtaaaaaaaaaaaaatgtatgccaacatttttcaataacttaaatgaaatggaaaaattccttgaaagacacgaactacaaaaactcagtgaacaagtaaataacctgaatagccctgtatcaagtaaattgaatttgtagttaaaagccttccaacagagaaaacttcaggtacctatagcttcatatgaaatgaaaaaaaaaataccaatcctctacaagattccagaacatttaaaagaagggaatatttcccaacttattccatttggacagcaatacccaggtaagaaaaagagacacagaaatttaaaaagaagaatatacattattccttaggaacataaatgcaaagaaatctaatcaaaattttggcaaatgaaatgtagaaatactttatgaccaagtgagagttacccaaagaatttaaggttggttttatatgtaaagatcaaccaatataggaaaatcacttctggaaagtcagagtaagaaactccaaaaatctactcctccataaaaccaataacagccttgatagaaatagttgaaattaattttccaaaactttggaaattaaccaaaggcttacaaaattccagagaacattaattcaagaaaaatggctgaatcagtaagaacagccagctttgtggcattttaatatgaccccttcccatgcttttctccctagtgctgagatagtcttaaaaattagcaggatagcaaccactggagaagaaaggtttggaaatttcccaaaaagttccatccccatagaattatcactatttgacctctaaagcccaatctataggatttatattcatttggactgactcagagctcactcagtaaggaaatctcaatttcaaggtattggtcaaaaagaatccatggcaattgttgactatcacaactgcctgaagtcttggtaacagttgggataaacaagaagctgatcaaaaactgaaaactaaaatcttgggaatgagatatctacaggatgcttcaaaaagctttgatacattcctgtttatctagaaagctacatgcaggctgggtgcagtggctcacacctgtaatcccagcactttgggaggccgaggcgtgcggatcatgaggtcaggagtttgaggccagcctgaccaacatggtctctactaaaaacacaaaaattagccaggcgtggtggcgtgcatctgtaatcctagctactcaggaggctgagacaggagaatcgcttgaacccgggaggcggaggttgcagtgagccaagattgtgccactgcactccagcctgggcgacagagcaaggctctgtctcaaaaaaaaaaaaaaaaaaagccacatgcatgtaattgtttacctctggctttccttttatgctctgggcaagctaaggaagagttgtgaactacctaagtgctgaatgggaaccataacacacacacacacacacacacacacacacacagcaccttagtaaagggtgagaggcatgttagttagaagcattaaaggaaatctctttctagtcattatctgtgcactaacctaactgagcagagacttcagtatccacatactacagggcatataaactttacagaattagtccaggaaaatcatatctaaaaaaaaaaaaaagcagtaacaaaaataaactctgggaaaggggagaatatgatttaaagagttgccacattatacataatatgtctagtgttcaacaaaaaattacgagacatgcaaagaaatagaaaaatatggcacaaagaggataagatgaagtcagtgaaactatcctcgaggaagaccagatgttggtcttactagacacagacattgaaccagctattaaaaatacgtacacagaactaagaaaaacatgtcaaaagggttaaagaaaggtataaaaatagtgtcttaccaaatatagactaccaataaagagatagaaattataagaaaagacaacatgaaaaaatataaagcaaaaaaattagacaattgaaacaagagggcctctattcgcagatttgagcaggcagaagaaagaatcagtgaacttgaagatatgtcaactgagattatccagtctgagcaacaaaggtgggaaaaaatgaagaaaactgagcaacaaagaactgtagaacagcatctctcataccaatggatacataaactggagccctagaaggatgaaaaaaggagaaggaaagaaaacttcccaaattttaagaaaaacattaatttatatacccgagatgaccaataaaatccaattaagataatctcaaagagaccaacacctatacacatcatagtcagcgtgtcaaaagacaaacataaggagagaattcttgaagatagtaagaaaaaaattattcataacatacacaccatcctcaataagtctgacaattgacttctcactgtaaaccatgcaggctaaaaaggcaatgtacataaccaaagtgatgaaataaaaaccttcaaccaatcattctagatccaacaaaactattgttcaaaaagaagaaatgaagacattcctaaacaaaatctcagagaaatgttctctataagacttgtcctaatagaaatgctaaaggaactccttcggtctgaaatagaaaggcactggagagtaaatcaaatccacgagaagaaataaagagaaccagtataagtaactacatgtgtaagtttaaaacaaagtataaatttattttgtttgtaacatttgtcttttcctatttgatttaaaatataatctcaattataaacttgtgttgatggtattatataaagatgtaattttgggttatagcaccaaaatggcagaataggaattttctgtaggtgtttcccacataagtatcaattttgacaaccatccatgggcaagagtaccttgtgggagttcaggagttgacagtaaaacttcagcacaccagaggagtaaagaaatctaagaatagattcattggaaagggtataaacagtttcactttacctgcatcaccaacccccaaaagtggcacagctcagtaacaagagcccattatttcttccacagaggaaaaggagagtataataagtaagtgtccagtttctcaagacatacaggcccctgcccaagagatccactttattttcatctcacccagaatattgaggtgatcagcaaggtggagtggttgggagagggtaaaagcaggaaagagagatggggactcaaacagcagcccatacttggaactgccatagatcctaccagttacttcatggactccatcaggaacccacctataagccacaggggatgcatccctcccatcttgccaacaaaaccccgaatgctccaaatgcctcacccactctttggctggctcccaagtgcgctcctgtgaaaagcgagtgagtatctctgcagatggcttgcaagcacatgttgacagctggctccactctgtagaactggaaaaaagctcacatacatgagaatttcaggacactaccctaaaaaaaaaaatgagacttcagcacctggcctggctttatgcaacctagagaaggtgatatgatttggctctgtgtccccacgtaaatctcatgtcaaattgtaatccccacgtgttggacaagggacttggtgggaggtgattgaatcatgcgggtggacttccctcttgctgttcttgtgatagagttgttatgagatccagttatttgaaagtatgtagcatgtcccccttcactctcttgcactcctgctccaccttggtaagacttgcttgctacccctttgccttctgccatgattgtaagtttcctgaggcctcccagctatgcttcctgtatggcctgcagaactgaactgtgagccaattaaacctcttttcttcataaattatccagtcttaggtagttctttatagcagtgtgagaatggactaatgcagaaggcatacaacctttagaatttgcccccttgagggaacaagatgtgtgaagcaggttcatccatagaaaatgtctgagagaacctcaaaatccctaacctgactaactgatgaaagtgtttctctcctaaggccagtcagtaaagaccagagggggtgactgtttctttaaatgcaaaggcagcagcacaataattcaagaaacatgaaaaatcaagaaaacatgacaccaccagaagaacacaatcattttccaataaccaactccccaaaaatggagatttacaaattggtttataatgaattcagaacaattatgttaaggaagctcagcaaactaaaaggaacaccaatagactactctgtgaagtcaggcaaacaattcatgaacaaaactagaaattcaaaaaagagaaaaattatcttaaaagaaaacccagaagttatggagctaaagaatacaatgcatgaaatgaaggagcgtatcaacagcaaagttgatcaagcataagaaaaaaaaaatctgtgaaactgaagactggctatttgaaattattcatcagaggattaaaaaaaaaagaatgaaaagaaataaagaaagcctacaggatgtataaaacaccatcaagagaactaatataaggattattggagtcataaaggagaagagagaaaagggtagaaaacttatttaagaaataatggctgaaaactctccaaatctaggaaaagatatgagcatccaggtatatgaagctcaaagatccccgtacaggatacattccaaaaagacttcaccaaaacacatgataatcaaactgtcaaaagcaaaatcaagacgatgaataaaccaccaatcactaagagggagacaggattcttatgttgtcattattatttacatataatttcagtaaatgttattggaaaatttataatgttttaaaaaaagaaatttgaaagcaccgaaagaaaagagactcatcacatacagggaacccttttaaggcattcaagagatttctcagtagaaaccttacaaaataggagagagtgggatgaactatacaagtgctgcaaggaaaaaaatgccaaccaacgctttacctggcaaatctgttcctcagaaatgaaggagagagaagaactttcctagacaaacaaaagctgaggcagttcatcaccactagacctgccttacaagacatactaaggggagttcttcaagctgaaatgatatggcaatagttagtaatatgaaatgataaacctcactggtaaaggaaagtacatagtcaaatttagaacactttgatactataatgatggtgtataaataattttactgtgctatgaaggttaaaagacaaaagtattaaaaaaaacccatagctgcaatagcttgtcaatgcatactacagtataaaaagatgtaaattagaacattaaaaacatagcatgcaagggtagggaagtaaaagtgtagttttcatatgtaatcaaatttaatttgttatcagcttaaaataaattgttatacctatgttttatgtaagtgtcatggtaactataaaggaaaaacctctagtagatacacaaaagaaaaagagaaaggaatcaaaacataacactacagaaaattatcaaattacaaaggaagacagcaagggaggaacaaagtaaaaagagcaagaaaaaatttaacataatgaaaacagtaagtccttacgtgtcaataattactttaaatgtaaatggattaaattatccaaacaaaaaaacagactggacaaatggattttagaaacaacaacaacaacaaacaccgcacacacacacacacacacacaaaccacccagccccaactatgtgctgcctacaagagatttacttccactttaaggacacatacaggctgaaattaaaagaacagaaaaagatattgcatgcagatagaaaccagaagagaggagaggcatctatacttacagcatacagaaaagattttaagttaaaaactatatcaaaaggctaagaaggtcaaaatggtgaagcagttaattgttcaagaagacataaaaattgtaaatatttatacacccaatattgaagcacctaaatatataaggcaaatattaatacatataaaaggagaaatatacagcaatacagtaatagtagtgaacttcagtgcctccctttcaaaaatggataatccagacataaaatcaataaggaaacatttaacttaaacttcactttagaccaaatggatctaacagacattatactgaacatttcatccaacagtggtagaattcacattcttctcaagcacacatggaacattctccaggatagattatatgttagctcacaaaataatattacaaaatttaataaagctgaaatatcaattattttgcaccacaatagtataacactagaaatcaataacaagatggaaactggaaatttacaaatatatagcattaacatattcctgaacaaccaatgggtcaaagaaaaaaatcaaaataattttgtgacagcaaagtagaaacacaacataccaaaacatacaggacacagcaaaagcagttctatgaggtaagcttatattgataaacacatttaaaaaaagattttaaataaacaacattacacctcaaggaactacaaggaagaaaaaaaaacaagccccatgttatcaaagggaaggaactaacaaagatcagacagaaataaatgaaacatagactagaaaaacaatagagactattaataaaacttagagttagttttttaaaaaataaaatcaacaaacctttagctagactaaaaaaagagaagactcaaataaaataaaaaatgaaagaggagacattacaactgataccacagacatacaaattaagagaaaactatatgccaacatattagttaacttgcaatgggtaaatccctagaaacatacaacctacaaaaactgaatcatgaagaaatggaagatctgaacagatcaataatgaataagggaattgaatcaatattcaaaaatctcacaaaaagaaaagctcaggatcagatggcttcactggtgaagactgccaaccatttaaaaaaattaataccactctttattaagctcttccaaaaaaattgaagaggagaaaacactttcaaattcattataagaggccagttttaccttgatatcaaagatttaaaaagaacactttgagaaaggaaaattacaggccaaaacccttgataaatatagatgcaaaaatgctcagcaaaatactagcaaacctaattcagcaacacattataatggcatacatcatgaccaagtgagattcatgcctcggatgcaggatagttcaatataatcaaatcaacaaatgttacactactttaacagaatgaaggataaaaatcatatgatcatctcgatggttgaactagtttacagtcccaccaacagtgtaaaaatgttcctatttctccacatcctctgcagcacctgttgtttcctaactttttacagatcaccattctaactggtgtgagatggtatcttattgtggttttgatttgcatttctctgatggccagtgatggtgagcatttttcaagtgtctgttggctgcataaatgtcttcttttgagacgtgtctgttcatatccttcacctactttttgatggggttgtttgtttttttcttgtaaatttgtttgagttctttgtagattctggatattagccctttgtcagatgagtagattgcaaaaattttctcccattctgtaggttgtctgttcactctgatggtagtttcttttgctgtgcagaagctctttagtttaattagaccccatttgtcaattttgtcttttgttgccattgcttttggtgttttagacatgaagacagtgtggtgattcctcaaggatctagaactagaaataccatttgacccagccatcctgttactgggtatatacccagaggattataaatcacgctgctataagccataaaaaatgatgagttcatgtcctttgtagggacatggatgaagctggaaaccatcattctcagcaaactatcacaaggacaaaaaaccaaacaccgcatgttctcactcataggtgggaattgaacaatgagaacacatggacccaggaaggggaacatcacacactggggatggttgtggggtggggggaggggagagggatagcattaggagatatacctaatgctaaatgacgagttaatgggtgcagcacaccaacacggcacatgtgcacatatgtaacaaacctgcacgttgtgcacatgtaccctaaaacttaaagtataattaaaaaaaataatgctgctataaagacacgtgcacacgtatgttcattgcggcactattcacaatagcaaagacttggaaccaacccaaatgtccatcaatgatagactggattaagaaaatgtggcacatatacaccatggaatactatgcagccataaaaaagatgagttcatgtcctttgtagggacatggatgaagctggaaaccatcattctcagcaaactatcacaaggacaaaaaaccaaacactgcatgttctcactcataggtgggaattgaacaatgagaacacttggacacaggaaggggaacatcacacactggggcctgtcgtggggtcagggtagggggagggatagcattaggagatatacctaatgtaaatgacgagttaatgggtgcagcacaccaacacagcacatgtgtgcacatgtaccctagaacttaaagtataataaaaaataaatcatatcatcatctcagtagatttagaaaagcatttaacaatattcaacatcctttcagaactaaaaactctcaataaatcaggtatagaaagaatgtgcctcaacactataaaagccacatatgacaaacctggaggtaatatactcaatggtgaaaagtaaaaagctttgactctaagatcagaaccaaaacaaggatgtccattctcaccacttatatttaacatagtagttgaaattctagctagagcaattaggcaagaaaaaaggcacccaagttggaaagaatgaagttaaattgtctctgtagatgacatgatcttatatatagaaaacactaaagactccaccaaaatgctgttttaattagagcttaaaaaaataattcactaaagttgcaggatacaaaatcagtatacaaaaatcagttgcatttctaaacaccaaaaacaagttatccaaaaaattaagaaaacaatcctatttgtgatatcatcaaaaaataaaatactaaagaataccaaagaaactgaaaataaatggaaataaatggaaagatagcccatgttcatggattagatgaattaatactgttaaaatgttcatactacccaaagcaacctacagattaagtgcaattcctactaaaattccaatgacatttttcacagaaatagaaaacacactcctaaagtttgcatggaaccgcaaaagactcaaatagatgaagcaattttgagcaagaacagtaaagctggagacatcacactacctaacttcaaaattttattaatcaaaacagcatgacataaaaacagacagaaaagaccaatggaacagaatagagagcccagaaataaactcacgtttatagagtcaactaatattcaacgaaggtgccaagagtacacaatggggaaagtatagtctctacaataaacagcactgggaagacaatatccaaatgcaaaagaatgaaattacacccttatcttataccatacacacaaatcaaatcaaaattgataaagacttaaatataagacctgaaaccatacaatctttaggcaaaaactcattgacattggtcttggcaatgatttttttgatatgacaccagaagcacaggcaacaaaagcaaacctaaacaagtgggaccctaacaaactaaaaagtttctgcacagcaaaggaaacaatcaatcatcagaattaaaaggcaatttatgaaatgggagaaaatgtttgcaaaccacatatctgataaagggttaatatccaaaaatatataaggaatgcataaaattcaatagaaataaacaaacaaataatccaattttaaaatgggtgaagaacctgaatagacattttttcaaagaagacttacagataggcaacaggcatatgaaaaaatgcttgacatcactaataatcagggaaatgcaaatcaaagctccagtgaaataccacctccaactattaggatggctattatcaaaaactcaaaagaaaacaagctgggggaatgtagagaaaagggaaaagaagatccttatacactgttggtgtgaatttaaactggaatagcccttatggaaaacagcatggaggttcctcaaaaaattaaaaatagaactactatatgatccagcaatttcactattgagtatatatccaaatgaattaaaatcactgtcttgaagaggtatttgcacactcatatttatttcagcattattcacaatagccaagacatggaatcaacctaagtgttcatcagtagatgattagataaagagaacgtggtatatagacacagtggaatctatttagtgttcaaaaagaaggaaatccaacttttaaaatcctttaaaaagttaaactcataaaaacagagaggagaatggcggtttccaggaactggagggtgggagaatggggagatgttggtcaaaaggtacaaactttcagttataaaatgaataagttctagagatctagtgtacaacagcattactatagttaataataatattttttatacttgaaatttgctaagagtaaatatcaatattctcaatacacacaaaacagaactatctgaaggcactgatatgttaattatcttcattatagtaatcatttcacaatgtataatgaatatcaaaacaatagtgtacatcttaaatatatacagttttgatttgttaatcatacatcaatgaagctagaaaaaatgttgtaatttttaaaacaatagtaatataaattaggggtgaaggaattgacctatgttggagaaaagtttttgtaaactatttaaattaattggtatccattcaagctagattatttttaattgttaatttaattgtaatactaaggcaaccactaaaaaagcctttaaaaaaatatagcacttgaggctgggcatggtggccctcaattatatatataatatatataaaatatatattatatatatagtagatgaacaacaatgggatttaaatggtacactagaaaatatctgtttaacaaaaagaaagcaatagtggagaaatataagaacaaaaccatgtaagatttatagaaaatgaatagcaaattggttgacctaaaccctatcttataattatattaaagataaatgaaataaatactacatcaaaaggcagagattatcagaatagagaagaaaaatccaaaccataattcaaccttatgttatctgtatttagaatatttagagtcaagacacaaatagatagagttccatttgggcgtgaaaatatttaccatgcaaaatgtaattaaaatagagctagagcagcaatactaatatctgacaaaatatactttaacaaaaattgttgctaaagacaaaaaagaacattttataataagacacaacaattataaacatatacaccaaacaatagagcccaaaatatacaaagcaaaaactgctagaattgaagaaagatagaaaaatcaatgattacagttggaggtgtcaataccaaactttcagtaatacacagaacaacaagtcaaaagcaaaaaggaaataaaaaactacacattatcatacaacaccttaatacgatatccaacaatagcagaatacacattattctgaagtgcacatggaatattcttcaggatgacacatattaggctgtaaaacatatcttaataatttaaaagaattgaaataatacagcacatattctctgactgcaaaatattaaaccaattacagaagaaaatgtgggaaattcacaatgatatggagatttaaaaatacttcaaagtaaccaatgaatcaaagaacaaatcacaagagaaattagaaaatattttagatgaataaaactgaagaaacaacataccaaaattttgtggttgtagctaaagcagtgcttcaagggaaatgtataacagtatatccctaaattttaaaaaaatctcaatccaataacctaatttttcaccttaagaaatgagagtgaaagagcagacttaacccaaagtaaacagaaggaagaaataataaagattagcatggagataagtagtgaaaataaaaacaatagagaaaattaataaacttgaaagttggttcttctgatatatcagtaaaattgacgtattattagtttgaccgagaaagaacaaaagagagaagattcaagttactagacataaatgaaagtatagatatcaccttacagaaattaaaagaattctaacagaatattgtgaaaaagtgaatgtcaaaaaattaaattatatgagatacacaaatccctctaaaggcacaaactaccacagctggtgtaaaaacatgaatacaccatttacagttaaaaagactgaatagataaaaattttaagaagaaattgagtaagtaatttaattttcaaactataatcccaagaccagatgttttcattggtgaattctaccaaactttaaaaggattaatatctatttttcatacactctttccagaaaatagaaaaggagggaacactctataactcactgtatgaggtccgtattacccttatatcaagaccaaacatcataagaaaagaagactaaagacttatggtttctgctctgatatgtttggaagtcatcactactattgtcacaaggaaaaatctgaacaaactaaagtcaacgatttcttaaactaaccatagaattgaggtaacgggcgaaaactggagatgtaggcaaatacaaaaaaaatcacagtttatcaggagcagaaactgctgaaaccagcaactcgtatgaacatgttaagtggtaattgacaaatttctggagattgaatgtggactggattgagagttaggaactcctaagtgcccagtttttgatgaccccacacacttttgtaaactagacttccaagagccccagcaagtttcttacagtgaagactgcagaaaaatcccctgatgcttcagataggaggaagggaaaagcaactattttgaaataagcccaggggacaagtagttatttctaaacactctcagagcattttctttcacacggcagggggctccctgcaagggaagctactttgcctgagccttgtctgatgtaggagaaaaggaattggatggctcaagctccatctagcctttctgatttatataagggaagcaaaaaataggttaagaaactcttctgaaagtcacaactcagatttattttatatttatttatttatttatattttttgagacggagtctcgctctgttgcccaggctggagtgcagtggcgcgatctcggctcactgcaagctccacctcccgggttcacgccattcttctgcctcagcctcctgagtagctgggactacaggcgcccagctaattttttgtatttttagtagagacggggtttcaccacgttagccaggatggtctcgatctcctgacctcgtgatccacctgcctctgcctcccaaagtgctgggattacaggcgtgagccaccgcacctggcctcacaactcagatttaaccataagattatagaacacttctcctcccaaaacagagatatagatcaatggaacagaacagagccctcagaaataacgccgcatatctacaactatctgatctttgacaaacccgagaaaaacaagcaatggggaaaggattccctatttaataaatggtgctgggaaaactggctagccatatgtaaaaagctgaaactggatcccttccttacaccttacacaaaaattaattcaagatggattaaagacttaaacgttaggcctaaaaccataaaaaccctagaagaaaacctaggcattaccattcaggacataggcatgggcaaggacttcatgtctaaaacaccaaaagcaatggcaacaaaagacaaaattgacaaacgggatctcattaaactaaagagcttctgcacagcaaaagaaactaccatcagagtgaacaggcaacctacaaaattttcacaacctactcatctgacaaagggctaatatccagaatctacaatgaactcagacaaatttacaagaaaaaaacaaacaacctcatcaaaaagtgggcaaaggatataagcagacacttctcaaaagaagacatttatgcagccaacagacacatgaaaaaatgctcatcatcactggccgtcagagaaatgcaaatcaaaaccacaatgagataccatctcacaccagttagaatggcgatcattaaaaagtcaggaaacaacaggtgctggagaggatgtggagaaataggaacacttttacactgttggtgggactgtaaactagttcaaccattgtggaagtcagtgtggcgattcctcagggatctagaactagaaataccatttgacccagccatcccattgctatatatatatatatatacccaaaggactataaatcatgctgctataaagacatatgcacaggtatgtttattgcagcactattcacaatagcaaagacttggaaccaacccaaatgtccaacaatgatagactggattaagaaaatgtggcacatatacaccatggaatactatgcagccataaaaaagatgagttcatgtcttttgtagggacatggatgaaattggaaatcatcattctcagtaaactatcgcaaggacaaaaaaccaaacactgcatgttctcactcatagatgggaattgaacaatgagaacacatggacacaggaaggggaacatcacactctggggactgttgtggggtcgggggaggggggagggatagcattaggagatatacctaatggtaaatgacgagttaatgggtgtagcacaccagcatggcacatgtatacatatgtaacaaacctgcacattgtgcacatgtaccctaaaacttaaagtataataataataaaaaaaggctacctaaaaaaaaaaaaaagaacacttctcctcccaacaccatatcaccacatcaaccaggactccagtgtaatagcagtgaattctaactgaaagaggtgaaagacactgattgtatttaagaaagatcttctaaggaaatccaaaaatagtaggggagatcaaaacaaagatactagaggaaattgaatatgtgacacctatagctacaaaaaaattaaacataacatagccctaaccatataaacataaaacctcacacaaagacctattatctgagattctgttgcctgatacattgcgttttatttcaataaaaaaattagagggtatgttaaaaagcaggaaaagttagtctaaagagacaaattgagcctcagaagtaggctcagatatggcagagatttggcaattatacctagagtttaatataaatgattaatataataagtgttctaacagaaaaaggcaacatgcaagaacggatgggtaatgtgatcagcaagaaggaaactctaagaaagaagtcaaaaggaaatgctaggaataaaaacctacaagaaataaagaatgcctgtgatgggttcctcagtagactggacaaggtcaaagaatcagtggatttgaaaatatgtcaacaaaaactgccccactgaaatacaaaagaaaaatagaattttaaaaacgtaacacaatctccaaaacagtgggacaattacaaaagatgtaatgtgcctaatgcaaatgacagtaggagtataaagggagaaaggaatagaaaatctgaagtaataatggcagagagttttccaaaattaatgctaaaccacagatacagcaagcccagagaacaacaaggaggaaatttagtaaagcgtctgcaaccaagtatgtcatattcagactgacaaaaccaaaggtgaagagaaaatattgaaagaagacaaagaggaaaataaatatcaagaaaatacatacgaaatacatcatacatacataagaaatacatcagaccatacaagcaagaagagaatggagtgaaatgtttaaaatgttgaaaaaaaaactatcaatttgcaattctgtatccagtgagattatctttcaaaagtgaagagggaaatggcagagaagtcatctccaagacctatggtttcccttcacagaaacactgaaaaatatgaacaaaagtggtcagaattaactttctaagaattctataaaatggtaaaatgtttacaccagtaaagcaaatgctgaattgagaaggcaacttaaaaaggtgaagaaaacttcgtattatttttatgtgtccttgccccacgtccttccctaccttagtcttgaagatggcagcccacatttctactgtggggctctggtttctgtttcctggttcaagagggagaataacagaccttacttttagtcattattatttccttctttctgatttccttgggtttattttgctcttctttctactttattgaaatgagaactaagattatgatttgagacatttttctaatgtaagcatttagtgctataaatttccatctcaacactgctttagtcacatcccacaaatttttatatgttgtaatttcactttcatttagttctatttttaaattttttctttttatacttcctctgactcacagattacttagaattgtgttgttcagttttcaaggatattgtagattttcctgtttctctgttgtctaatagttctgttccattttgtacagatagctcacgctgtatgatttcaattttttaaaaaattgtgctttgttttatggcccagatatggtctgtgctgtgaatattccatgttattataaagtatgcctgttatattattatatatatataatatatataattataaagcatgcccgttttgtattgttagcagagtattctagaaatgtcaatgagatcttgttggttgatggtgcttttcagttctatatctttgctaattttttttttttttgcttagtagctatatgagattctgagagaggaaattgaagtctccaaccataattgtggatttgtctatttctcctatcagttctatcagtttgtgcatcacatatttgaggctctgttgtttggtgcatacacaagtggaatcattgtgccctcttggtggcttattttatgattatatagtgcctatctttgtggtatttttatttgctcttaaatctactttgtgttatattcatatacccattcttttttaaaaaaaattgtttgcgtgatacatcttttccattcttttaatctcagcctatctgtgccattgaatttgaagtgagttttcatatagagaacatattattgaatcatcattttaaaaattccttttgccaatcttttttatactgaggtaaaattgacataaaatttatcattttaaagtgtacaatacagtggcatttggtaatacacatgttatgcaacgttaactctacctggctcctaaatgttttcatcatccccaaaaggaaacttcatactcattaagcagttaattcccattccttctctcggccactggcatccgcaaacctacttttctgtctctatgaatttacctattatggatattttgtataaattgaattatacaataagtgacctttatgtttggcttcgttcgcttcgcatactatttttcgatattcaaccatgttgtagtatgtatcagttttatttgaataactcaattctttttgttgtatagctaaaagttgattcctaggtcataatgataattctatgtttagtttattgaatagctgccaaagtttttccacagtggctctgtcattttaaaatcccactagcaatggatgagagttccaatatctccacatccttaccaatattgttattttatatttttataattataattttcctagtgaatacgcaatggtatctcattgtgtttttggtttgcctttccctaatgactaatgatgttgagcatcttacaatgtacttgttaactatttgtgttctttagagaaatgtctattcaagtgccttgtccattttaaaaatcgagttgtcttgttgacttatgagttctttaatacagtaaacgcttatcagatatgatttataagtattttaacccattctgaaggtcaccttttcacttttgtggtagaccattatgcacaaaggttttaattttgataaatccaatttatccgcttttgttgttgtttttgttgttcgtgcttttgcaaaacctagtgtcatgaggttttctcattatctttggagaattttatagtttgggtctatacatgtagattattgatctaatttccattaatttgtgtgtatgctacgaggtaggggtccaaattcaatttttgcattgaattgaaaattcatattttcagtttcaaatttcaactgcatattcagttgttgcagcacaatttgttgaagagatcattctttaccacagggaatgatctgggacccttgtcaaaaatcaattgatcatagatgtatgggattatttcagactttagatcttgttccatgaatatgcctatttttatgccagcactgcagtattttcattactgtagctttatcataaattttgaaatcaggaagtatgtatcctccaagtgtgattttcatttgctagagtgttttgactatttggggtctttgcaattccatatgaatttcagaattggcttttcatttaaaaaaatggtagttgagattttcataggaattatattgaatctacagatcactttgggtagtattgccatcttaacaatattgtattccaatccataaacacggatgtattgccattcatatctttttttcttttctttcggcaacatttagtatatgacacttgtaactccttggttaaatttatacctaagcattttatcctttctgatgctgtttaaatggaattattttattaatttctcttttagatggcttgttgcaggtgtatagaaatagaactgattattgtgcttttattgaattatctgaaactttgctgcatttattaactctagtaggttttttttttctttaaagttgtctatatatcttgctctgtgaatagataattttacttcttgatctccaatatggatgcctttctttctttttcttacctaattgctgtagctagaattttcagtataatgtatgatagaagttgttcacaactatccttgtcttctttctgatcctaggggtatagctttcagtctttcaccattaagcacaatgttagctgtggggttttcttagatgccatttaatatattaaggaagtgctctgctatttctaattggttgagtatttttattataaaatggtgttagattttatgactttatgtactgcataattgagattatcatgtggtcttttcattcgattaatgtggtatattttatgattttcatatgttgatccacctttatattcttggggcaaatcccactgtgtacacgggttttttagggtctcctaattttcttcattctttttcttttctctccctgagactgaataacgttaactgacctatcttcaagtttactattttttcttctgctgttcaaatctgcttgaacctatagagtgaatttttcattttacttattgaacttttcagctccaaaatttctctttggctactttgtataatatctatctctctatagatattctctatttggaaagacatttttctcctggttttctttacttatttgtattttttaaagtctttaagcatatttgagacagttgatttaagtatttgtgtactaagtccattgcctaagcttttgcatagagattttatattaatttcttttttttctgtgaacaggtcttttttttttttttttttttttttttttttttagaaaactggacattttgagtagtataaacgtggctattttagaaataattttcctccctccttaggttttgtttccacttgttgcatgttgctgttgtttgctcattagtgacttttctaaagtattttgaaaagtctgtgttcttgatcatgtgggtccattgaattctgtattctgttaatttcatagtcagctagtgttctgaaagttcccttaagtgcatagagccaataaaagaaaaagaaaagaaacacagaaaaagaaaagaggaaaaaaggagggaaagagatttaaaaaaataatgtcggttgggcatggtggctcatgcctgtaatcccagcacttttgggaggccgaggcaggcaaatcacttaaggttgaccatcctggccaacacggagaaaccttgtctctactgaaaatataaaattagccgggcatggtggcacatgcctgtaatcccagctactcgggaggctgagaggtaggagaatcacttgaactcgggaggtggaggttgcagtgaactgagatcacaccactgcactccagcctgggcaacaagaatgaaactccatctcaaaaaaaaataataataataatgcctttgccgatttgctctgtgtttgggccctcattcaatgcctagtcaggccatttacaactctctcttaactttcactacctgcttgtgtactgactgaaggccacctataggtgaaagcttaacatcatctcagatctttttggaccatgaatcctaccctgggtatgcacatgatcttcttaatttcccagtagatgcaagagttttagtgttttaaaagtccttattccctcatctatcttcttttctgacctttttcagtctgcttattgttcatctgaactgacatcctttgccccaagcggctgtggcaaaaacttttacctttaaatgctttcaccacaagccacttgggaagctgccccagacctgggactgctctgaccctgatgaaacaaagacaagaccttgtacagccaggcagccataagacaagtccatacccaaaccacagttctttcagaataaggtctatattggattctctggccctagtaaccagcatgagtctgggcttgccatcttcatggccacttgtcttagtttgctagggctgccataacaaaatatgagagactgagtggcttaaacaagagaaatttattttttcacaattctgaagaccagaagtccattactctgaaatctctctccttggcttgcagatactgccttcttgccgtgtcctcacacagccttttctctgtgtacacatccctggtgttttttaagcctgtccaaattttctgttcttctgaggacaccaatcagattggattagcgaccacccatatgatcattttaccttaagtacctcttcaaaggtatcagagtagtatatttgctacagttgatgaacctgcatacaacatcatcacttgaggtctgcagtttacattagagttcatcgttagtgttatatattctagggtttgttttgttttgagacagaacagagtcttgctgtgttacccaggctggagcgcagtggtacaatctcattgctacctctgcttcccagattcaagcaattctcatacctcagcctcctaagtagctggaactacaggcgcacaccaccatgcccagctaattttcgtatttttagtggagatggggtttcaccatgttggccaggcaggtcttgaactccttgcctcaagtgatctgcccgcctcagcctcccccagtgttgggataacaggcatgagtcaccatgcctggccttattctatgggttttgaaatgtataatgacatgtatccatcgttgtagtattagatagaatagcttcattaccctaaaagtcttctttgcactgggttgagttttaaaagctctttgattattttatgacagttccttattagatatatcttttgcaagtatttttatcagtctgtggttatcttgtcttttacagagcagtaatttttaattttaataaaatccaatttgtcaattacttatctcatatgactctggtgttacatctaaaatgttaccaccatactcaaggtcacctaggttttctctaggaattttatggttttgcattttacatttggtgtatgacccatttgaagttaatttttgtgaggttgtaaggtctgtgcctagattcattttttttttttttggcatgttacttcagtattcataagaaacattgttctgtaatcttctttcttatagtatcttagtcttgctttagtttttgggcaatgctggcctcactgaataaattcaaagtgttccctcctcttcaattatttggaaaagtttgagaaagactattgttaactgttttctaaatttttggtggaatttaccagtgaaccaactggtcctaggcttttctccagtaggtggttttgattatgctttcaatctctttacaagttacacatctatacagacttttataattcagtcttggtaggttgtgcgtatttaggaatctgaccacttcatctaagttatccaattagttggcatgcaattattcgtagttctctgaataatcatttttatttccacaaaattggtaatatcccagtttccattttttatttcattgaatcttcttttttcttagctaatctagctaaatgtttgccaattttgttgatcttttggaagaaccaacttttgatttattaattttctctactctttttctgttctttatattatttatttccacactaatctttactattttcttccttctgttggcctttaattttttttttttaatttttaaggtgtaaatttaggttgagaaattttttaaatgaaagcatttagagctataaattttccttctggtgttcctttcactacctgccataaattttgatatgttgagtttttgtttgtcttggagtattttctaatttgtcttctaatttcttccttgacctattggttatttaaatgtatttaatttttgcatattgtggatttcccagttttccttctgttattgatttctagttttattccattgtgatcacagaagatattttgtataatcgcagtctattaacatttattaagtcttgtggcctaacagaggatctatgttggagaatgttccaagtgcaattgagaatactattctggtgctattaggtgaagtattctctatatgtctgttaagtccaattcatctatagtgttgacgtttcctgttccttactgattttctgacttattattctatccattattaaaagtggagtggtaaagtctctattattgtagaactctctgtttttcaagtctatcaatatctgtttcatatattttggagctctgtttgctgcatatgtgtttacaattgttatatcttcttggcaaattgaccagtttcatcaacataaaatataattcttattgtcttctaacagtttatttttctttttacataaagcctattttatctgatcttagattccctcacactccaccccagcacgcttttggttacatttacataatatatcttttccatcctttcattttcaacctgtttgtgtctttagatctaaagtgaatgtcttacagacagcataagctatgtcattaaaaaaatccattctgcttatctctgccttttgactggggagtttaatccatttgcatttaaagtaatcactgatcattaaatactttcagtattttgttgttttatgtatgtcttataactcttttgctcttcatttccttcaatattgcctttgtgtttagcttatctttttgtgtcacactttgatccccttctcatttcttttttatattttctttgtggttaccaggaggacaatgtatcaacttttaaagttattacaattttatttttttaaatctctcccattcggggattttaggaaggttaaataataatgtaaatgagatacctagaacaatataagcattcaggaattattaactcaattccaatccttcctccacctccacctctttctctgtgagattatagaaaagatgacaaaaaggatgttttctgagccctttaattgttgagaatgatctttgagaaaaagaaaaaaaatgaaagcactaggaatgtacaacagcctggaagtataattaagtgtaaattaaatagataaaagttataagcagaggaaagtatagtagaactcagtatttaaaagagaatcaatgtgaaaattatataaatttatgtaaaataaaactaccagacaaatctgatatccttaggatttttctttctttcatgtgatttctaattgctacatatgacactaaaccattgatctgagctgtaagagaaactggaaattgttctgttatcttttgtaagatttctagaacattttgccctcagacttaaatgccaacgtatttctcacttattgtttactgcttttggatttacatatgatttgattctttcttatctcttatccttacaatgtaattcaaactgatgccaatttaagttcaattgcgtacaaaaactctactcctatgcagctccgccccatctaatttacattattgatgtcgcaaattccatctttgtacatagtttacatattaacatggatttatacatttttatgtatttggtttttaaatcctgtagaaaataaaaagtcaacacaccaatattaaaataatactggtttttatatttgtccatgtgcttacctttatcagtgttctttacatctttatacgggtttgagttactgtcttgtgtcctttagttccaacctaaagaactccctttagcatttttatagggcaggtctagtggtaatgaactctctgagtttttatttagggatgtcttaatttctagctcctgtttgaagtaaatttttctggatatacaattctctgttgattgatttttgttcattttcccttcagctcttttaaatacattatcccactttcttctgccttccaaggtttctattaacaaaattcagcttataatcttattaaagatctcatgtacatgagtggcttctctcttgctgttttcaagattctgtgactttggtttctgatagtttaaatataatgtgtcttattgtgggtctctttggatttatcctagagtttcttggtcttcttacgttggtatatccatgtatttcaagacatttgagtagttttcagccattatttcttcaaacaatctctcctctttggggacttccattttacctatattggttcttttgatggtgtggcaccagtcccctagactttgttcacttttttccagtcttttatttctgcttctcagactcaacagcttcaagtgttctgtattcaagtctgctgactctttcttcttccagctcaaatctgctgttggatccccccttgtaaaatttttaattccattttagtgtttttcaagttaagtatttttattaggttcctttttataatttctttttgttgatattctcattttattacacataatttgtctgatttccattagtttttttctttgttttcctttagctctttgaaaatatttaagacattttaaaagtctttatccaagttcaatttctatggttctgtagagatattttctgccagtttatgttcttcttttccatgggccatgttttcctgtttctttgtatactttctaatttttggttgaaaactgagcatttgaaaatagagccaactttcccagtttctgcagagagtctttatgccacagtattcgttcactgattaactgggtatatctaagcttagggagcagctgagtcaaaagtttaaggtcttctcaggtcttttctgagtatacatgtttcctatgcctgtgtgaaatgttctcaatttccctatataaacagctacttcttcttttttttttttttttgagatggagtctcgctctgtcacccaggctggagtgcagtcatctcagctcactgcatcctccacctcccaggttcaaacaattctcctatacaggtgtgtgccaccacgtctggccaatttttgtatttttagtagagacagggtttcgccgtgttggccaggctggtctcaatctcctgacctcaggaggattacaggcttgagccacagtgtccagcctaaacagctacttttgaatgctttaatttcctgaatagtctcaacccagtttttccttgaggtcttaggtggtccattgtatgtctccacccatagttgcttgccccaggcatctgtgggtctgtggtaccactgcagctttcaccacctgtagctgccacctttccctatctgagatccaggttaggtgagagagatcattccttcacgcagtcccatgacaggttggaacatttcaaataaggtctgttctgctcctctggttgaagggagaaaattgggaaccggtttcccaccttctacaaaccaagatctcatgttgccacgggagtggcagggcaagtgcaagtgaaaatgccatacaattttctaccattttgaacgcgggtttttcttcaatggtcatttgcttggttgctgtaggcctttcactgttttccagagctcccataagattactttagccagttttttgttctttcctgatgcttccctggcagagtaagggttggaacttccaccattttgctgattcataactctgtagtcagttttaaatatattgatacttgagtttgttttatggcccagaatatggtcttggtaaatgtttcacatatactcagaaagaatgtgtattctgatgttgttacatgggctgttctataaatgttacttaaggtggttaataatgttgctcaagtcttctatattcttgctgattttcttttatttatttattttattttttttattatacttttaagttctagggtacatgtgcacaacatgcaggtttgttatatatgtatacatgtgccatgttggtgtgctgcatccattaactcatcatttacattaggtatatctcctaatgctgtccctccctgctccccccaccccatgacaggccccagtgtgtgatgttcccctttcctgtgtccaagcgttctcattgttcaattcccacctatgagtgagaacttgcggtgtttgtttttttgtccttgtgatagtttgctgagaatgatggtttccagcttcatccatgtccctacaaaggacgtgaactcatccttttttatgactgcatagtattccatggtgtatatgtgctacattttcttaatccagtctatcattgatggacatttgggttggttccaagtctttgctattgtgaacagtgctgcaatgaacatacgtgtgcatgtgtctttatagcagcatgatttataatcctttgagtatatactcagtaatgggatgggtgggtcaaatggtatttctagttctagatcttgaggaatcaccacactgtcttccacaatggttgaactagtttacagtcccaccaacagtgtaaaagtgttcctatttcttcacatcctctccagcacctgttgtttcctgactttttaatgatcgccattctaactggtgtgagatgggatctcattgtggttttgatctgcatttttctgatggccagtgatgatgagcattttttcatgtgtctttggctgcataaatgtcttcttttgagaagtgtctgttcatatcctttgcccactttttgatggggttgttttgttcttgtatatttgtttgagttctttgtagattctggatattagccctttgtcagatgaggagattgcaaaaattttctcccattctgtaggttggctgttcactctgatggtagtttcttttgctgtgcagaagctctttagtttaatgagaccccatttgtcaattttggcttttgttgccattgcttttggtgttttagacatgaagtcctcgcccatgcctatgtcctgaatggtattgcctaggttttcttctagggttttttatggttttaggtctaacatttaagtctttaatccatcttgaattaatttttgtataaggtgtaaggaagggatccagtttcagctttttacatatggctagccagttttcccagcaccatttattaaatagggaatcctttccccatttcttgtttttgtcaggtttgtcaaagatcagatggttgtagatgtgtggtattatttctgagggctctgttctgttccattggtttatatctgttttggtaccagtaccatgctgttttggttactgtagcctcgtagtatagtttgaagtcaggtagtatgatgcctccagatttgtccttttggcttaggattgtcttggcaatacaggctcttttttggttccatatgaattttaaagtagttttttccaattctgtgaaggaagtcattggtaacttaatggggatggcattgaatctataaattaccttgggcagtatggccattttcacgatactgattcttcctatccatgagcacggaatgttcttccatttgtttgtgtcctcttctatttcgttgagcagtggtttgtatttctgcttgaagaggtccttcacgtcccttgtaagttggattcctaggtattttgttctctttgacgcaactgtgaatgggagttcactcatgatttggctctctgttagtctgttactggtgtataagaatgcttgtgatttttgcacattgattttgtatcctgagactttgctgaagttgcttatcagcttaaggagattttgggctgagacgatggggttttctaaatatacaatcatgtcatctgcaaacagggacaatttgacttcctcttttcctaattgaataccctttatttctttctcctgcctgattgccctggccagaacttccaacactatgttgaataggagcggtgagagagggcattcctgtcttgtgccagttttcaaagggaatgcttccagtttttgcccattcagtatgacattggctgtgggtttgtcataaatagctcttattattttgagatatgtcccatcaatacctaatttattgagagtttttagcatgaagggctgctgaattttgtcgaaggccttttctgcatctattgagataaacatatggtttttgtctttggttctgtttatatgatggattatgtttattgatttgtgtatgttgaaccagccttgcaacccagggatgaagcccacttgatcatggtggataagctttttgatgtgctgctggattcagtttgccagtattttactgaggatttttgcatcaatgttcatcagggaaattggtctaaaattctctttttttgttgtgtctctgccaggctttggtatcaggatgatgctggcctcataaaatgagttagggaggattctctctttttcctatttactgtacatttattccaccagtgactaaaacaggtgtatcaataaaatctgttccctcaggttttgcttcaggtattttgagggtctgttatcaggtgcataaacaagattgttatgtcctattcttaaattaatctccttataattatgaagttaattttttttttcttgagatgcagttttgctctgtcgcccaggctggagtgcagtggcacaatctcggctcagtgcaacctctgcctcctgggttcaagcatttctttgcctcagcctcccgagtagctggggttacaggtacctgccaccacgcccggctaatttttttgtatttttagtagagatggggtttcaccatcttggccaagctggtcttgaactcctgaactcttgatccacccaccttggcctcccaaggtgctgggattacaggtgtgagccactgcgcctggacctggcccgaagtaaacttctttacccttgctaatgatctttgctctgaagcatgctttgctggtattaatatagtcattccttctttctttgattcatgtttgcagggtatatctgtttccattcttttacttttaacctattgtctttatatttaaagtgcatttcttgtaagtataattggtttcttaaaatccaattatctgccttttaaatgtcatttttatatgatttgcataaatatgattattattacagctaaattgaaatctgtcatcttgctatttggtttctatttatcccatttttttcccctctttttttgctttccttgagattgaacattgtattagttttctagggttgctgtaagaaagtgacataaagtggatggcttaaaacaacagaaatttattgtttcagtttggaggctagtcatctgaaaccaaggtgtcatcagggccgtattctctctgaaacctgtagggaagaattctttcctgcctgttctagcttctagcattttccagcaattcttggcattcctttgcttgtagatgtatccctccaatctctgcctctatcataacatagccatcttctccctttatctgtctattcttctcatcttataagaacattaattactgaattggggcccagcatagattaggcctaatctcatcttgaataggttacatctgccaaagattcttcttccaaataagatcacttttacagcttttacaggtactgagagttagaacctcaatatatcctttggtggggaccgacctcttacccataaaaagtattttatatgattccattttatctcctttttaggttattaactacaatttttttttcttttttttgagatggagttttgctcttgtagcccaggctggagcgcgattttggctcactgaaacctctgcctcccgggttcaagtgattgtcctgcctcagcctcctgagtagctgggattacaggcatgtgccaccgtgcctggccaatttttgtatttttagtagaaacagggtttcaccatgttggctagggtgggtctcaaattcctgaccttaggtgatccacccacctcggcctcccaaagtgctgggattacaggcgagagccaccacgcctggctttataatttttttttaattcagtggatgttttagggtttatagtatacatctttatcacagtctagctccaagtgatatatccctttatgtatagtacatgacccttacagtagtgcatttccatttttcctctctggcatttaggctattgcacacacatacactcaattcatccctttgtgtagatccgtatttccagctgctatcttttgcttctgtctgaaatatatgtatgatttcttttatgactattttgagaaatttggttatgtgcatttgtctatttttcttatgtacttttagctcatcaatcttaagtctgtgagtttatagtttttaaaaacaaatttgaaattatttggctattatttcctcaaatatttttttctgccgcccctgctttccctttccttagggatctctgatttccacctatattactctgattgaagttgttccacgtctcttttgaaaatctctgaaaaatcttttatcatttggataatctgtatttgtacatcttcaagtacattaatattttcttttgcaatgtttaatctgctgttaatcccatgtagtggattcttcatctcaggtattgctgttttaatctctagaaattccattgaagtcttacttgatgaaaaaggcagataaaaacaaatgttggcaaagatatggagaaatcagaatctgcacacactgatgatgggaatgtaaaatggtcaaggcaatttggaaagcagtctggcagtttctcaaaaggctaaacgtagttcccatatgacagcaatcattcatctaggtatatactccagagaaataaaaacatatccacaccagaacttgaacattaattttcatagcaacattattcctaggggtttaaaattttttacattatttttatttaaaatagagacagggtctcactacgttgcataggctggtctggaactcctggaattaagcattcctcctgcctttgtcctgttttctccactggaaaagaataaaactttgtacacttggactaacaactcccgattccctcctttaccaacatgccccacagcctctagtaacttactctctactttcatgaattcaacttttttaagattccacatataagtgagatcatacaatatttgtctttctgtgcctggcttatttctcttagcataatgtcctccagattcatacatgttgtcttaaatgacaggatttaccttcctttaaaggctgactagtacttcattgtgtatatgtatcacattttctttatccacttatctgttgatgggcacttaaattgtttcaatgtcttggctactgtaagtaatgcttcaataaacatgggaatgaagatatcccttcaacatattgatttctgttcttttggataatactcagaagtgagattactggatcatatggttgttctatttttttcagaaacctccatactgtttttcatagcggctgtactaatttacattcccactaacaatgcatgagttcacttttctggacatcctccccaacacttgttatctttcatctttttcataaaagccattatataataggtgtgaagtgacatctcactgtggttttgatttgcattactctaataattagtgtgagcattttttttttttcatgtaccgaatgtcttttgagaaaggtctcttcattcctttgcccattttaaaatcaggtggttttcttgctcttgagttgtttgagttccttatgtattttagatatttacccatttccagatatatcatttatattttttcctattctttgagttccctcttcactgtgttgtttccattgctgtgcaggtcttttattttgatgccaccccatttgtctatttttgccatgcttttgcagtcatatccaaaaaaatcattcccaagaccaatgctgtggagatttccccctatgttttcttcagtaggtgtacagttttaggtcttatatgttaagttttaaatctatttttttatatggtgtaaataagggtctaatttaattcttttgcatgtggatatccagttttcccaacaccatttattgaagaccctgtccttttatacttttcagtatgcagatcttttacctccttaaatttacacctcagtatttaatatttgttgctattatgagattttcataatttccttttcagatagctcattaatagtagatggaaacactactgatttctgtaagatgattttgtattacggaactttactgagtttgtgtatcagttctaccaggttttagttttgttctggtggagacattacagttttttgtatatggttatgtcatcagtaattacagatgatttaacctattcctttcctattaggatgccttttttttctttctcttgtccaactgctctggttaggacttctagtactatgtcaaaaagtgatgagggtcgtacatggcctccatacctaatctgttgagagtttttaccatgaaaccaggttgaattttgtcaaatgctttttctgcatccattgagatgatcatatgatttgatttacaccctccattttgttatgtggtatatcacactttttgatgtgcatatgttgaaccacccttgcatcctaaggataaatcccacttcatcatggtgaatcattctttgtattcgtgaatccagtttgctaatatattgttgaggatttttgcatccatgttcatcagggatattactttgtaagtttctgtccttaaagtgtctttctctggctttaataacagtgtaacactacccttgtaaaatgaatttagaagtattccctctgcttcattgttttggaaaagtttgagaatttttattagttctttaaatgtctggtaaaattcagtagtgaagctgcctaatcctgggctttcctttggtgggatactttttattactggctcaatctcttttcttgttattggcttattcagatttgtttcttcatgattcactctttgtaggttgtatatgtctaggaatttattcatttctttaggtcatccaatttgatggtgcataacttcatagtagtttcttataatcctttgtattttggtgatatcagtagtaaatgtctcctctttcatttctgatcttatttgagtactctttttttctcctagtctaggtaagaatttgttgattttatctttcaaaaaaaaaaaaaaccaactcttagcaactcttagttttgttcatttttttccagtctttatttcaactgtgatctttgttacttacttctttatgctaactttcgggcttagtctgttcttttcctagttcctttaggtgaaaagtgagattgtgatccttcttctttattggcgtaggtttgtatcgctataaatttccattaggactgattttgctgcatcacataagttttgtttccattttcatttgtctcaaggtaattttttatttactttttgacttcttctgtgaactattagttgtttgggagcatattgtttaatttccacatattgctgtattttccaccagaattgattcttgttcttgatttctagtttcacgccattgtaatcagaaaagggatttgatatgatttctgtccacttaaacttaagattagttttgtggactaacatatatcctggagaatgttccatgggcatttgagaacaaaatgtattttgctgcttctggatggaatgtttcatatatgcctgttaagtccgtttggtctaaagtgtaattgaaatccattgtttctttattgattttctgtctaggtgatcaatctgcccatggtgaaaagtagagtattgaggtcccgtattatagtattgcagcctatctccctcttcacatcatttaaaaattgctttatgtatttaggtgggtcaatgttgggtgcatatacttttacaattgttatgtcttcttggtgaattaatccctttatcattatataacaaacttctttctttttatagtattgacttaaagtctattttgtctgatagaagtatagctacccctgctctcaatttccatttatatagaatatctttttccatcccttcactttcagtctatgtgtatgtttagtagaaaagtgaatctcttgccgggcgcagtggctcactcctgtaatcccagcactttgggaggccaaggcggcgggatcaccagaggttgggagttagagaccagcctgaccaacatggagaaaacctgtctctattaaaaatacaaaattagccaggcgtggttgtgggcccttgtaatcccagctactcgagaggctgaggcaggagaattgcttaaacccgggaggtggaggttgcggtgagctgagatcatgccattgcactccagccttgacaatagcaaaactccgtctcaaaaaaagaaaaagaaaaagaaaaaaaagtgagtctcttataggcagtatgtggttgtgacttaaaaaaaaaaaaaaatccattctgtcattctatgtctttttgttggagaatctaatccgtttacattcaaggtaactattggtaagaaactgctagtgtcattttgtaatttgttttctgattgttttgtaggtcccttgtttcttttttccctattgctaccttcctttgtggtttggtggttttctgtggtggtgtgctttgaatcctttcttttatagtatatgcgattaccattgtatttgctgtaaggctaacttaaaacattttatccttaggctactttaagcgataaaaacttgcctttagttgcatacaaaaactctacgctttcacaacccccccgcctttcgtgattttgatgtcaaagtttacacttttttaaatttgtatctcttattgtagctacagttacaattacttcttgtagctacaacttattgtagctacagttgtttttaatagtttcatcttttaaacctcctaataggaataacattgctttacctgccacctttacaatactagagaattctgactatgaattacttataccatttagttttttacttttatgtttctcattaactagcagtcttttatttaagcctaaagaactcccttttagtaattccagtagagcaggcctagtagtgacaaactcccttaggcattgtttatctggaaaagtgtttatttctccctttgccaagtaaagtattcttaattaacagctttgtttccttcagcactttgaatataccatcccactctctactggcctgtaaggcttttgctgataaagccactgaatctgtattggggctaccttgaatgtgatgtttcttatctttgctgctttcagtattctttgtctttgatttttgataacttggttgtgatgtgtcttggtgaactctttaggttgaatctgatcggtgacctcagcttcctgttcctgaattttgtcatcttttctcagatttgggaatttttcagctattacttccttaaatatgctttctaggcctttttctttcttttctccttaaggacctcctattatgcaaaagttagctagcttgatgtgtcctgtaattcttataggcattcttttttgtttttgtttctcattggataatttcaaatgtcttacctttgagctcattgattcttctgcttgatcaagtctgctgttgaagcgttctacttagattttcagttcagttactgtattctttatctttagaatttctattgtttttgtttatatttgttaaacttctcattctgttcagatgttgttttccaaatttcatttttctatccatattttcttgtactttgttgaacttaagaggattagtctaaattatttgtcatttcacaggtctccatttcttctgagtctgttactggagctttcatatccaatgtacaccagaaactttgctaattccacagtaaatgttagaaatgggtttttattgataaaatcagtggcttgctaattagtatgttagaagctggcttgcattggtgaagttgagggtattcgatatacgtatcccggctaaaatacttctaaagaacctctccagctttgcaagaatagagtataggaatctgaggaggcctttaacatggccctcagaaaggacacacagggcttgacctctaaacatataaacatatacagaaacgaggtcagaacatgttttgactgatgccagtagtaacacagcagagcctattgctggtcactgttaccaataccttgtgtaataaacctttcatttaaattgagaggttgtaagccccgaaaaagcaaagggcttacagtacctcttgcctgaacactcctgtgtgtgctttctaagaaatgcttttaaaataatgcctgtggcacaaattgatttgacactggctctctttataagctgctatcaaggttgtggggaatagctaactcttacccactttccctgacaaataggaacccgtagttacctaccaaaagtatgtaaaagctatatccgacccaaaggccagttaggtcaaaacaccttgaaaggagctcagtttaaggaaatcagtggtgtcacagtgccccactagcgtgtaaaagttttcatagtttgactatcggatgtgcttagtttcacagctgagtcttaccttgtgatacttttagagcaaaagtcaaatcaaagatgatttaaaaaaacatttcaaagattcataaagaataaatgcctcctcaggaagtcttctggagttctgcccacttcccttaggtggctctttactgtgcccatctcatagcctgtctccttccacttggtgtattgcagagtaaagctcactgtttacaggggtggtagaaagtgtggtcctttcccagactcctttttcccttcctcttctcatttttcagaagatgtgtttgataataaacgaaacaaaatgactaacacattgagctgagctacataagcagatgtcagtttgacgtgaagagtttaaaagatctatgcattatctggggactcctcccccagacctgaaggatcaggtgctgccttctatgccacctgtgcagacagcaaaagaggaaaaccatacccacgttcagtatgaacaaaggggacatttgaactctgtgtggacccctcattggaagggtgtttcttctcctgctgcatccacaaagagcactccttagccttgccttttgtcagttctctctccaataaggcttgagcagagacaacccagtgcagttcagagagactgaagtctggtgttccaggtctgagtcctagctctagctctctgtgtaactttgggatgtcccaaagtaacttttcacaacttgataggtgttaacttgaattttggatacaggtgactcttagcccatcccctctctgtgcttcagatatgtcatcacttgggccatatgacctctggacacctttcctactttccacaatttcagagcagcagagcagactggagctcctgctgcctctgagcttcagtgaattatcactcgttggagggaagcttcaagcattttgttatctttcaagagcaaacacagtgtctgtcagcaagaatatgtagcagatgctagtgaacagcagtgattagggttgaatgctggatttaaatatggagcttaggctgtgaaggaagcctgaagaacctagagccccatgaagctgccctctgtgagatctgacaccatttcccactgatgagccatgggtctaatgggtagcactgattccacatacagtatgtgagtgcaatacagtgaaagcaaagagaataaaatgatggctaacatgatgttccaaactttaaacaggagaaaaacacacaattccattatgtataagaacccacacagagatcaggagaataacctcattggagaatgaatgacctgtgtggggaatttagggtagagttgagattgaaaaaatgggccgaagtcaggtggccaagggccttaataccttgtatacaagatgtgtagtcaaggaagaccatgccttacttatgcatcaattcccttgggcctacaaagagctgcctagcctgggactgttgtagagaaaagctacagtgttccaatgacacagggactcctccatgtatgtatgagtgcccagctggctctgtaataaatcttatttttatttattaacttttcttgcgcattggcttgatgcatcagttggaagtcagaggccaaacgaagtgaacactgagccaaaggaagttctcagcctttagggaggcagaattcactttaaacacaataaacaaatgaactcacattatacaggagagagtcagaagatcccagtggctggtgtcatcgggccatatttgcccgaagtgcctattccttataggaacccactcccagggttgatgggctacatccttaggaggctttatgcctatgttctcctgaccactggctcctccagggctggccttttttagtctctctgtagaggttcctgtagctggttggatataggctttcacagaagggtcagtgccttgggtctggttacaggactgttaatcttgctttgttaagagtaatgttatttccccatttccaaattctccagggagatggaatgtcaaagatagtatgactgtagcacctaaatcctgggttccagaagcagagaagagaatacactgaagctgtagaaaggcctattagtccatgtcagagattaactggatgcgaggaccatttctgggatggtgtatacagaactggagaactggatagggagtcagaaacaaagagctgaagatgatgcctttgaagtttccaacgtggataactaggtcaacagaatattactcaagaaagtattaacataggattgagatgcagtcagtagtaatggaattgaaatttcaaagtatatacctcatggatctcagggggtgttgagctgatcacctgggctaacactcctatgaccctggggaaaatcaaatgacctggtactgtagccatggtaggggtgtcatcaccttaatccaactgggacagtgctgtttgatattcatctggaacttggtgcagacccacattttgctgggtttcaccacaaccaaggcttttttgattcttttctcttttaacatcagtacatcactgcaaagttaatcctcatataataggagatgaaactaattgcttataaaaacaagatttttacaacactaaaattgttcaagcatatgggcatatttatagttgcaggcagtgtttcagatgcagactgttcttggctgcagtggttgtttacaggcagcatctgttctgattaaatatttgatgattatccccgaatgttttaaagcatagtactgggctctgctgactgtacaacaaactggcatttttgacctatagggcactgggctaggagatacagttctgagggaagtgaaagatagttaacaactgcacaactgaccctttattagttgcaataaagcaatccaaccacccaacccactgtgatggctttcctactatttaaggttggtggtgtcaaagagacaccctcctgtacagtgtgcagtgaatcaacatcatttccacaaaacctccttcctgcacaaaggaattatcatactttgttacgaagtaaaattttcctgtatcagtcacaggagttcaccagttaagatactgttagttgaagacttctggggtgacttaatgaaatagctcagccatctggtttaaaaactggattcttctatccctccacacagctgtccatgcacctgcatcatctcaaggctggtctccctggtggtagaaaggctgacagtaaaaactggagccacatgattccttgcttaggcagtgtttcttcatactctcacatgagagcaggcatgttctttccctaggctcacagtaaacactctgtcaaatctcacaggcccaaagtgcttttggttatccccattccaagccaatctgtggcatggaagatagcattaccctgactgccttagactaatatacctactccacttctggggctgggaataattttgaggtcaaccatccaaactgcatgacagccattccatggaagaggtatggcctaaatctttggggcaacctgaattcatgaaaactctcttagatttatgtaactatttttagaattcacttctgtatcatttaattttactaataaaaataccacctttaccctaaatgtcagccaagcgtaaggctccgttgggacagaaggaactatcaaagctttgtgtttttatacattagcagcatttgacaaagaaataactctgaaggaaggagaataaccaggcagagtctagatgcatggaaaagaagtctttgagaaggcttcgcaggctgaaggaaagggcaggactacttcaggaatacaacgtttaagtaaaagaggttggggtctgttgatcttgaggagagatgaggatggactggaaaataggagtgagatatagtaggagaggaaaggatatggatgatgtatatactgtatgggtaaccatcagtcgaccctaagaagataatagttgttaaatggttagctatttaatgaaagaaacctgaacaagtaataatcttgagttgcaaagtggctggagtcacacaacagactaaatttctggtagaacaaatccagcagcttatgtgaaggttaccatgtctgaagctggatagaaaaggtctaacttccaaccaaagtcacagttcttgagctcggtacacagagacagactgctaacagctgatgtgtcctcagcgagagtgtcctcatttatatcctcgttctcttctgcctcctttttttgttttaaacttttgggaagtctcatcattcaatacagttctaatatatcacaataacagaggcggcccaatttctacaaattgactaattctatccctgaaaagttcatacaataaaactatacaaagcatcattttcaaccatcctatagaaaaatttccctattaaattttaactctaaatcctctatctctgttaataaccttactaaaaacttccccatcactgcctgccagggagatcaaaagaaaccaaatttaagaaacctccaacacctgtacctgactgaaaagcaaacatacagacctttcagtcctgcccctactattcagctcctatcacagagacatggtggatgtccccttgggaagcggatagctcttaggtggaagctaggcctgcaataagcaggccaggaaacatgtctcccaggccccatactcttggcagaagcacttggccaccagacagcatgtcctgtcaacctacagagttcttaaaaacaaacactgggacccagaatagtaccctgtggtcatagtgcccacagttcactaagcaccctcacaggtctttgacagaacactgactgccaggtcacctggtgggcagagaaatggaagattcccaggcccaactagcatctcagggaagaaccacaagcagagcaactttcagagctggtcggccagcgttggcacccagggaagcaagtgctattccatatttggagagaacataaaactcaaggaaacagagaagtcctactcaataccgttctcaactgaaaacaagagaacttgcaaaaaagaaacccagttttctggagtccatggagaaatatgaagccaatgctcggctaacagagcagaaagccttttataaataatgccagtcaaagctccaaaggtcagagctgatgcatgccggattgttctgacaatttcttaggtttctaggcaacaaggagctggtcaaacagctcacctccaaggacatactttataataccaccctggtagacgagagcgaggcagcagtgaaggcaatagtcaagaacaggagagggaggtaaagaacaagatgctcttcagacagtctggacaaagacagtccctacccagctctcaggagttgcctccttaagaaggtggaggcccaggcagctcccagggtgaccctaaagacagactccaaggaaaagggtgtgagggcaatggtgaatataaggaggtcccctttcagtaggcagagcaagtcagttcaggtcttatttttagagtctctgaacagtgaagagaagctttctgtggacagcattccaccaccatgggaggggaaaggtgccatgagagacttctccagtggggcatacaagcattgtgcagtgatccccaagatccagccactggcaggaaatcgaaaggcaagcttcttaaatacatagtatatggagacagaagtgtggagcactcccaaaatgaaaggccaagacccaggaacaacctccacaacctggagtatatacaaatgaacccagccctgctgactcagatccacaccatcctaaagcaggggtttctcatgaatgaaagggctaagtatttggtggagagaatgagaagtctcccactgcccacacattttttcttcagagatttcttttccaagagccccttgaataaaggaagggagggagcactgaatgccccagaaatcagaatgcatggtgcgggaagacgacaggaaatagttctcaaagagatcagaaaataaattggaagcaatttcattaccacaaagaacagacattttttctaaggcacccctcccctttccacccaattgtcattcagcaactactgaatacttaccaatgaaaaacgttacccctgacctcaaggctgctcctgagctctggtagaaaatgctttccttgtctataaaacatggcaagcaaggcaggatttaacagtaagggcacagtagcactgcaagccttcaaatggaaacctggagacaagcagtgagaacaggaagcaaaagcagggcaggtgaagctaggaccagggcatctggaactttccacacaggttggatctccatgccagacaacagttttcaaggaaaaatatctaagaggaacatgactttgggaaactttttggcagtactgcttactgtatactagagagtaaaagaatttggggaacattcaccaatttgcttcttcaggggcttgggtagggaacgtgaacaggaacctggctctaatttctgaacttttttatcagtaaaaacaatccaacaaacgaaagctagtcagtgagagaactgggagggtctgccctccttccctgagtcaagccttctggggggacctcctgacatttaattaagcaaagacaacgcccactgaaggaagctgacctgaaagtgacacgctactgtgaaatgagcatgaagtgggagcttgttacatatatgaaatggccagcgatcctgagcaaagcgcttcagagcttgagacctaagtcttctcatctatatactgagggctggacaagatgatctgtcaagccatttttatccctaatccaccaaaatccaatgctttagtttattgtcacaaaagcaggtatcgaatggctatcctgcagtgcctccaatcaacattcagactttttccctgaggcaatataagataacagttaacatgtttttatcaattaggtggtcatgagataaatatatatgggaagtggtagtttttcacttaaatgcatataataatggtacagctctctttgaatagtatttgtttatttcttaaatatttaagttcctaaagacggtaagaataacccaaggaagtgaaatcaatgtcacaaagcacatggctaaataactgcaggtttgcagtgccatgtgtgagatcagatgacagaagggagaactacctttaggcagaggcttctcatgtcccctggagtggccatgtgctgttctacatgactacttccacttcggttatgtagaagctatttaaagcacacagatgtttgtgatgagaaaaaagccacccttaattgaataatggaaattataagcatgatttgagggtgggggtggaggtgggagtagagatgggtagaaaggagtgcaatggaaacaaaggagccttcataaaattcaagtcacttcttaggataacgtgattgatttactcaccaccttcttaggaacataaagcaaacaagtgggttttccttttactgcttttctgaaatgagctacactcaagaaagcagcacgggggttgtgctgtccctgcacagtggcaggagagtatgaggagcaggtgaatgccacaacagctccatccaagatcatttttcacatgcaggaaccattcttatactaccctttactggtaatttctgtagaaatctggaagtctggttgacaccctcctgtacagtgtgcagtgaatcaacatcatttcccttggactttgcaatcacggtggcattcatacattcattcaacaagtatgtatgtacaggacagtggagtaaagaaaacagatagttcttactctcacgaggcttaaaatttcaggagggaactaggcagtcatgaagtaaacataaaaacacagattgtaataggcactagagaataatgaagactttggggaacacaatttaaattggaaaaatatctcagttccgttaacacatgttgaaggggaatagcattgttttgctggatttggggcctggatgcaagcatgttgggtatgcattgtagggtaatgcatttccttccatttgggcccaagtgtatatttaccacccagttgtgatgagctgggatcctcctgctcaatctcagcttgaagcacttggaggttatctgcctgctgtgggtgattattttggagcaaggtacttcatttgcctcaagaaacagatttgataccactactgtgcccttttggaacagagaagtaggcaagaccccagtgtgaggcagagtgatgggatctttagggacataattgatgatgtaactgatgatgattttggagtttatacatttccaaagtttcaaaatattttcacttggttgatttatctttatggtgatgacactacgtagatatatgcccttcttaaaagttacagtaagaggctgggagcggtggctcacgcctataatcccagcactttggaaggccgaggtgggcagatcatgaggtcaggagattgagaccattctggctaacacggtgaaactccgtctctactaaaaatacaaaaaaattagccgggcgtggtggcgggcgcctgtagtcccagctactcaggaagctgaggcaggagaatggcgtgaacccgggaggcggagcttgcagtgagctgagattccgccactgcactccagccagggcaatgagcgagactccgtctcaaaaaaaaaaaaaaaaaaaaaaaaaaagttacagtgagagttgacattgagaaaagggaggcccagccagggttatgcaaagacacagtagggaggaggatgggaagtttctgagacaccccagtaactgcatgggtccacaaagcacatgtacagtctgctctatgcactgcaggtacagccacgaataagacaaagtctctgccctcatggagcttggtgtctgtctactggagcagacaaaaacaaacctgctttttctcatttgcctctactgtgggttccgtgtataactctcaaatgctagcatttccatgcattccatccttgtccttctctcctctctgccttttccaggagaattttcctagccacaggttcagctatggtctatgtgctggagtcatacatttttatcttctgtgtacgtttttctctagacccatatttttaattgccttaggacagctctccctggatatccctcagacacaactaaaacatcattcaattgtactattaataattttcccttcaaaatccactcctcttctctatagacctaacagcaacactgtccgtccagctctcaaaacctgaaatgtgggagttgtctttgactcttatctttcccatgcatgagcactgaatcaatcagagtccctagcatgtcttggactgtggcctcccttctatcttcagattatctgcctttttagaattatggcaataacttaactgcaaagaccacatgtgcacttgtgctctttcagtttgtaataaatataaaatgaaaagtgattatgtctttgcttaacgtctgcaaaataaaagtccaaagtccttggtatggtctataaggccctcattatctgacctgcctgccttcccaatctcatcttaatcccttacagcctgacactcagacatactagactttccacctaactcactcacatacacctatcctgtatgtcaagattcggcttgaccttcatcacctacctatctgcagtatttttggatctgaattctctgcccacattgtactttcacatacttcttttacccttagtggtttgtacttatgcctggtctaactagattgtctccctgtaacagacttcttgattcaacaaagcagctctgaatcagcctgaaacctatggcacactgcaaaatggcaaacattcaataggtatttgcccagtaaatgttaatgaaaggaaaaaaattcaaacttcagttggaataggattagagacaagttaaaaaaaagtttcccatagaaatcttcctcatcgtaaatatcatcatcctaaatgtcccgagtctttccatgggtctaatttaccaaatcatgaagactctctttctcactgtgtatgtgtagtgggagaggcagagacagaacggtttttttttttttttgcaagtctgctctctggattcgtttttctggggatgaaatctcaggctatgtagcttttctggtccctttttggtaatcaacaaatcatcagtttctctaggtattaaaaagcctacacttttgaaacaccaagaggccaaactctctcttaattgaaaacataattctgcctcttactgaggtctttgggtgggaagcttaaagacagcagtgttggggcaattggtttttcttttcctccctccaccttctttcccattcaagagctgttgctgccctttctggaggggagggaattagaaaaaaagatcctgccttacccagtcactgttaattattactttgagccagggtggggaatgactttctttcctggaatacaccctgctggaaaccacagctgagattctctaagctggcagcttccaacctctcctccctcaacagcttcaacattatatggcactcagctgcagggtgcctggctccaggccggcagtccatttgtgcagggtagttttcaagatggctcatagcccatctctttcagtgaccagcgtggcctatgggaaacatacatcttgactccattattggtaggagtactctttagttaactgccacaggccagttcagacacgtcttaccctgagagccttttcagagtcaggtaccatccctgtgtcccccagcatctgaagatcacaggtgaaggtctccaagtagttcacttaaaaaatacctcagtaggtttaagaacagggaaagctcccaattcattctgtcaggagtatgactctcatccccaaactggacagatatataatatgaaaactacagaccaatattccttatgaatatagatgcaaacattctaaacaaaatactagcaaaccaaatccagcagcatagaacaaggtttatgtagcatggacaactgagattatcccaggaatgcaaagttaattcaatatacaaaagtccattaatacaacatattaataaaggacaaaacaacatgaaaatcttgatacagaagaagcatttaacaaaacccacagcccctcctttttttttttttgattaaaaaacactcagtaaactaggtttaataaaagaatttcctcaacttgaagcaaacccacagctagctaacatcatactcaatggtgaaagactgaatgctttccccttaaaatcaggaacaagaaaaagatgtctgctcttgtcacttctatccaatattgtactggaggtgctagccagcacactaaggcaagaaaatgaaataataggaatctagactggaaaggaagaagtaaaagtatttctgttcacagatgcatgatctcatatgcaaaaaatactaagtgacaaaaaaagaattttagaaaagctacaatatacaaaatcaatatacaaaaattaattttatttctaacaccagtgatgaatacaaaaataaaaattagaaaataatcatataattaaagtggcatcagtaaaatacttagaaaaaaattaaagacgtcaagacttgcacactgaaatctctaaaacatcactgaaataaagacctaagcaaatgcaaagacatcccacagtcatggaacagaaaacctaacaccattaaaatagcagttatttctcaaatttatctaccaattcaactaaatccctatcaagatcccagctgttttgcaggaattgacacaatgatcatataaaaattcatatgcaatgcaagggacccaaaacagacaaaatgattttggggaaaaaaaaaaaaaaaatggaggacttgcacatcccaaatctaaacttactaccaagctacagccatcaagacagtgcggtgctggtataacgacagacatatagggcaatggagtaagactgagaatccagaaagtcttatatttatggtcaactgttctttgacaagggtaccaggaccattcatggggaaataatagtcttttcaacaactggtgcttgggcagatggatatacagataccaatgcacttatgcaaaaaatggatgaaataggaaacttcactacattctactgcatgctcggtcattttcaatcatttaggtggcaacactgacaagataacagaaagatggaggtaataacatgtgaaaggcaaaatggtttgtttttttttttaaaaatgacagtctctatcatgaatttacttacactccaggcaaaggttattagaagaaaaaaagatgtaagaaaattccttaactgaaatgtggaaagagtatcaagaggagaccctaagacactctgtaagaatcccagtgactcctcactgttcaactaagaaatgtaccccattatgctgtgctaccacggaagcattggaggcactttgggggttgatgaagtcttcatggatgaggtactttaaatatctggtcatgaagagtatttgagaaatatgacaagtgaagatgctgggtaggaatgcagcgaggaaagtgtgtaacacaaggccaaattggaaaggtcagtgagggggcaatctgtggaggcactgaatgcagaggatattaaaattagcaagatagtgttctagcacaatgaaaaggattggaagagggagatgagagtcagggagtgaaattaggcagctgctaagaatgtccgggtgagtcagaggatcaggacctgtaagggcagtataaagaaggaaggaatgatgggagaggtttagggggaaagaagtgacaacctgtgacaattgaggaatgagagattttgatgattggggtgaaggttacatttcttaaaaagaaacaaagaatggtcggtcgatagagatgcaagatgaagaattttgtttttaggactactgactatgaggtaacaaagaaatcccagagacagaggtctgagcaaaagatatgggattggggaagaatctttgggagtgactgaggttgactagagggaactgggcaagaacaggtaaggactttaagcagaattggaggagtatccatctaaaatctgggtaaactgggatggaaaaacaagtagccagagaagcaacagcccaagctagggtgttgtcaaggttatagatgttactgattttggcaatgaggagattataaggatccttgaagactgtactttcggtgaaactaccatgcattagtagcctttcacagtgatatctaccccacacctgcatcaaaatcttgcagtgcctattaataaatgccaacccactaacggggaggggagaaaagacttgggactctgtacttgtaaaaccctctaccctccccaggcaattctttacacactaacactgttgaggtaaaaggagacaagtgagggagcaaatggaaggtgtgtttttggattatacagtggctcatggaagggtgggaggggtacagatggcccttagacactggcggaaagtcagagaaaaaaaattacagtaagcaggtaaagggatcaagactacacagggactagtcttgggacgacatttcttcctctgacagtttgtatggaattcttgagaaaaattcctcgaaggggcctgaaatctcagaatggtcatgtttttaatgggaatagggagtgatgctgccccattacaaccatctgttctaacagaatgtctgtaccgaggagggatgagtaacatcggcaagttctgttcgaagcctttttcaagtttctttttgatatgtatctatctatctatcatctccctatacaagcaagcatccccaaaagtagttgtctcaggaaaccagggttaggatgaccagctcatttgctggagctgccaaggtccagaaaagtttggctgcaggctgttttcatgttttatgtatgtttgaaatgttctataataataaaaggttaaaaaagtttacatttatttggaaaaccagttactttagtttatggttcctttttttccctccagagcttcctggagattgaggtctaattcaaagaaaaccaaaatatataatagagtacctgggcaaaaaaagtacttttataacataacatttggggtagaggaagtatccactgtagtcaaaatgtctatgttttgctcttccttattgttcagggacattccattaaatagtaatgaaaaggcagcaaaagtaagaggagtgacaacatgcccggcataattaagcaagctagagcagctattctgtgcaaccgacgattttttttctctaaaattttaagggtaggttcattctgactctgttaaaagtctacttgatgtgaacaactctatatctgataacctatttcaattaccactttaaaacttgtcatatggatacgttattacaattgtagaactttaataaataccataataataaaacttgagaactgaagagcacacatttcttcacgaatttattatataaaacgccctcagagtatttaatttctcctcactttaattacacattaagaagcacagtggatgagaagcctttaagatgactacagttgcacgaaggtccctttcatcaaggtagcgtatgtaccctaacagtgttctaaaggctggcccagaaaaaccccatgttaccttatcacaatatggaaagcattgtcttctttttccactaaattaaattatggtgaaaagtgccacagttttatttagcattatggtacataacaaacagttctgtctcaattatgaaaaaaattaattaaaataatcctgaaagacatcctttttctccccccaatgatttgaaagctgcatttttcctgccaatttcaaacaaacaaatcatcaggttgatctacagtaatcagttaaaacaatcagtcaatcaatcaatcaatcaccaaggcacaagctcagcacattagctatagcttgtagcaaaaggatatatcaatgtctcaccttagttaaaaatacataatccttttattttataatgcaataaaagaaattaacaacatcacatacacagaagactaggaaaggggaaactacttacttctggaaatcagtaatgtaaacctacttgtacttttccatagtacatgaaagtaacgtttaacatgttttgaattaattaattaaatttaatctgtggggctatacaatgtaattcttaggagtaatagtttcattcatttccaggtcagcttactgtatgattaagtaacacaaggcacagtagccatctttttcattatgttgcaacactgatcacgtgcctcgataaaatggctgattcaacaagatgatggcaacacgaaggggagactttggattgtctatttaaaatctaggtaataagtaagtaattaataaaaactctatcttaagtgcactttcacatgctttttgtttataataaacaaacaacaaacttcctaactttgttgcaataggcttgactaccatttcatttggccaaatgcactttccccagtaaacttaaaacaacaacgagaacaacaagaacaaaaatccctgtcctttcatatactaagaaagaggattggctactgaaacagttcattgcaagacacatgaagacgacatactgtggcatgagttgtttttgtttttaatttgttgtgctgttactaaagttctgagggctgcagttaaaacattccaatttctcccttccttccatctttctttattgattgattctcaagattttgcacagaaaactctttgggggctagaacagcagtaattgcatcacactgttttcaagacttcaagtttcaaaagcaaatcattaaaaaaaatacagttcctgatttgagttagatacagggacaaaaaagtagcacatacttgaaggttacgtggtctacaaatggtggcaatattttccttgggagagtagttctgttggtatatattttttaaatactcaaaaggctcaacctcaagcagtaataaacacaagcaaaagtgatttaacccttaaaataaatattcagaaaaacctctctgtacatacaagtgaaagaatatgtaacactttcacgcaaaaaaataattataataataataaaggatttgttcatatatgtagctgaaatctgctgttccagcccacatgtccccaataaagaagggaggcacagacataggtgactactgtggttgactatcttacagcctttttgtactgggacactatcaccaccaaaaatttatccctcgttatatttttaaaattttttaaattttttctttttttttccttccttttttttgttttattttgttttgttttgttttacagcatgccaaatcctttggcatacgtgatggccttcaacaatctctctttaagtttttctttgcttgagtattccggaagtaaaagcacattaaagcaagtatgagatgtaggtaacctaaatagagaaaaggggaaaaaaacaggaaaactgtaagtcatgggaaatacacttagaattaaatgctcctatttttagattgtatatagttgagacggtctgcaatgcaaactatacattaatgcaaatcataaactttttgttgtgtaactaccaagttgcctttatcctataaattactcaaagctagtgacgatgataagatactgtatccattgagtttttactacataacagataccattttaggtactgaattcttacagttcatttaactaaatctttccacaacaaaaccacagagaggacatcagtaaatgcactttagaggttaggtcactgagaagtcaagtaacttcctctaaggtggagaaaatactcaaacctgttttacaagactgcaaagtgtgtgctcttaaatgcttattagaaacactgctggcaatatgactaagaaaatgatttgataacaggattctagcacaatcaaatgataatcttccgagcctcaatgtaaccattctaaatagatgatcatgttatatggctttcaattaacaagctgggaatcaaaaaagtaaatgaatcacactaatttgattccaaaccaatgtgagccccataataatttttaactagggcaatttcttaaaagtttcctcacacaatgacagcaaagtattttctcaattgtctaatatgatttggggatttgtatataaaatcacgaatgtgctcagaaactataaagacagttcatatgtatgtgacgaggaatgcaaggttttcggtaggtatacagtcacaagttaataattacctacctttctgtgtctgggccatttttggctataatcatctttaattttcctagtcctcccacaggtgctctgtctgtgcccgttgtaaactgcaagaagagtcttttctgttcatctgtaaatgaatgaacgatttcccagaactccctaatgagaaaaaatacaatactggtttcagtttggcattcattatgactggtactaacataagcttatgatttgcattaaaactatattaagagacaacttggaagttaattatcaggatagtatcacttctggtgatttaaaaatttccaagcaaatttatcctgaacagctctgaatacgtaaaaatttagattagattacaatatagtaaaatattagtactacaatagtaaaaaattgagaaaacccaagtgtgtagtaacaggaagtgactatttaaactatggtataatcacattatgcagtcagtaatgagcaaaagacaaaatcctatgaattgaaaaagactgaaatgaatatttggaaaaattaactccaggtgcctttgggtatatattttatttatcctttctcctttattctcctggtctactcatcctttaactcaactttgggaggaaaaagtgatacagattaaggacaaaagaaaaaaagaccccctgccccaaccaactggccccaaatgcaaacaactacatacctaatagcagtaatacaaaagttcaatttttatatgaactagaatactttaaacaagtaatatgtgctgtgtatggaggaggagaattattctgacatttctgccacctgcagttattttaagagaatgatttatcctgtggcattcctaaaatctatgtaataaaagctatgttttaatgacacttatgttagtttgagttctaaaaaacgaaatacaagctcataaagtgcaatcttgaagtttatttgaataatcaggcatctataaaacatatatacactagttcatagctaaataaatttttttttttttgagacagagtcttgctctgtcgctcaggctggagtgcagtggcgcgatctcggctcattgcaagctccgcctcctgggttcgcgccattgtcctgcctcagcctcccaagtggctgggactataggtgcctgccaccacgcctggctaattttctgtacgtttaagtagaggcaggatttcaccatgttagccaggatgggtctcgatctcctgacctcgtgatccgcccaccttggcctcccaaagtgctgggattgcaggcatgagccaccgcgcctggcctatagctaaataatgttaagattaaaaaattaaaaaaaaaattaaaagtatttttagttgcttatataatataaaatgcattttaatagttatttagaaagttctttccagagccaggtgtggtggctcatgcctgtaatcccagcactttgggaggctgaggccagtggatcacctgaggtcaggggttcaagatcagcctgaccaacgtggtgaaaccctgtctctactaaaatacaaaaattagccgggcgtggtggcagatgcctgtaatctcagctacttgggaggccaaggcagaagaattgcttgaacatgggaggcggaggctgcaatgagctgagatcacaccattgcactctagcctgggaaacattttgagccatctcaaaaaaaaaaaaaaatttcatctcaaaaaaaaaaaaaaaaaaaattccagaatgttagcagagaacatcacacatcccaaaccagtaattacaattttctaccttttgatattctaatatcccaacatactatttttattaccaaaatgctggcatttttggtgctgcaacaccatttatctgaaataacttaaaagttttattagaattcttggctttctccaatctcttgccacttcccttccctgcccctttacaaatccaccagtcagcaagagaaaacaaaaaagaaacacacaacaacagaaaactggacatgaaacttgcaggagcatctctcaggtaaggaggagaggaatcggaccccagttcatgatactccttttggggaggctgacaagagaaaacaagtctgctgtagcacagaaccctccaacatagcagaaaagctgccctgcagtgggtggtaataaagcctcctcacactgcaggagggctctgaagcttaactgaaccagctacacctaaggaggtagaccaaagagcaccaccgaagaacagagacagaccctgcaggaagtggcagatcagcagtggtcacaatgaccagtctggctatattattacggagctgtttctttggacttttaaacgaaacctttaaaaattttatacaatgaaaacagggaacaaaatgcatctctattcctataagtgttatgtgtgttacattaacattttgaattaaacaagaatgcatatatttagaaagctgaagaaaacacgaagaagcttccaggtttccacataaaagtggtggctgtatcgatcacatcctactcacatctctaaaaatctacccggatcaaaaaggggaaaataaaaaaaaaacctatgacttaggtctagagtaaaactaggagacagaacaataaactccaaataccaaagaagtggggaaatgagcagggtccagcaggagctacatcgaagagtggcttgtgcggaatcatactgattagggatcacccaaggccagaccccaccccctccaccacctgcccctcaacagagcactactgagtgtaggttagagcactggcaacagggtggttaaaggaaggactacagaaaagtacttgggtccagcaatggcaggctcaggaaggcaccatgcatgaaaggaaggggggtaccttcaaaagcagaagtgtcccttaagcggctgtaaaggggtggaagcagctaatgaaaaagagtcttcattaagctacatggagctgaaaaatcagaaagtggtgattctgcccttactaaagcaacagaagagggatcccttcaaccaagacccctaaagccacacaattcctccctgctccaccatgaggtctagtaataacaggtccagaaaaaagtaacatctgttatagaaacataaacaagaaaaacagaattcggaagtctaaataaagttattatgggaagagtctggcgaatgagaagcaaaactttccggtagacaaaagtagaccagaaaaattcagtcataaacaatgggaaactagtaacaccacattccaacacaaaaggagaatgcagcagcagacaagacagaccaccagtgatgagaaatacaaattcagaaagaaatgagcacatcttaaataaaaataagaatactaaaaaatactgaagaaatatgcaaggtaactttggaaataaaggctaattttattataaggtgaccaaagaagaagcagtatgactaaaatttctactgaggacagactctagaaaattaaaaaacaaagaaaatgaataaaataaacataactaaagaaatgcatatcaaagcataataacgaaaaagattaatagctaactacataaacataaaacctttcatttggcaaaaaaatcctataagcaaggttaaaagacaaatgacaaactgggaaaaaatatttgcgaatttaccagcgttaaaggactaatctccttaacatataaagtttctaaaagtgaagaaaacgaccagctgagcagcaaaatgagcaaaagactatataaaactataaacagctctacaagaaaaaatgtccattatcattcataattgaggtaagctcaaaaattgtaactatagtaaaataccatttctcaattggcaaataagtaaacatccacatttaacaacacattctgtttggaaagttttaagaaaagagatactgttgtaaactgctggtgggaatgcaaaatgttatttttctgtgaaggaggatttggcagtatctagcaaaattacacatgcatctaccatttgatgcaacaatcccacttctaacaatttatcttaatgatactttacatatgtacggaataatgcatgaacattaagaggattcactgtgacattagtactaacagcaaaaggttaaaaataacctcgatgcccataaatattgataagctatgctgcatccacacaaaggagcagtattcagtcatacaaaacaaaatggaaaacacctctgcaataatgtgggatgattctcaggatacactaggaagattattttcctagttctgtcctctgataaggcctacaagcagtaacgttcaaaagcaaaggccatactttgcatctaaaatctgacttctaaatgccattctccaacaatttattggaaaaataacttattccaggcctgagaatgaatgttcgagattagttagaaatctcaaaatctaatagggtcattttaaaagcacacgatagctaagcaatttgaatatcatttagagtaatgactgtgaaacgtattaaatacaaaaacattcattagttcgtaatattcaaaaaggcagcaaaaaccaaccaaaaaacaaaattaaattgtcactattaaaattattacattaactccttactctaaaaaccttaaatctattttatcatgccttttctgtagaactgtttttcaaggtaatcaaatggcacccaatgatgagaaaaaagaatgccaggtatatatgtaggacaagcagatggaaattttttttccccaaacagccattttgcaatccccaatgagataacagattaaggtaatgatactgataaatacgaaaatcaggtgaagggcaggtagcaggttctggaaagatgatgatggcaacgacatagttattattattattattttttgttttattccctcccaacctcccctacaaaaacagcaaactgaatgagaaaaccaaagacccagagacattatctacaacaaaaccatgaaccattgcatataattggacagaaacaaagctctgacaactacaagactggttagtaaggaagcagatgcaaggtaactgactgggtttctgacagccctgagaacactgccaacccactggaaagcacaggccaatctgaaaacagggcttaaagttttaaaaagttctacaggatctaatttgcagatgattacaaagggatcatgatgtagtaagctctgggcccttaaaacacccgaataccaaacccccaccagaaacaaaccttgtaccgaggaaaaacttctgggaataacttccgaatggaccaggtcagtaataaaaaccaaaaaaaagttcaaatatatgtgtgggatagaggagtaaagaaggcagtttcagaaagcacaagggcatatttttgaccattttacaaaaacacagacttctcctcgtccctaaaaagcgaaaaaagttatcctggcccatctctccctcgtccaagtatgagaaactcatttcactcacacacacacacacacacacacaaataaataaataacagaacagagtgaaacagtgtaattattagagaaaaagtatgtgcatatacatgagaatggtgtccctacagaaaatcaaagtacatgaaacaatatgcaaataaaacatgaaaactgtaaacaaatttcaaactgagctaaaaagaatttaaaaaataacaaatcattagaaatgggaaatttctgaatgagggtaactgaaaaaaaggaagacatgacacaactaaggagtaattagaaatgcaaggaaaaaaatcccatcaaatacaaagaaactaaaactaaactagaagaaacataaaggtgaataaaacagaacaataataccagaacctgaaggcagaagaaaaatcttaaaatcaaaaagaaacaaacccatgcttgagactctccttgctggtccagagccacagtgctgctgtgtactggcaggaggaattctgctataattggtcctggcagtgttcacctttcctgcaagtgttccacagcccagggacacaatgtggtcaggagcactgccaggaacaccagcaagggggagcctgccacaacaggcacaaggctcaggaagcactctccagcccacgaaaatctagtgggggtcctcttccctcacccaaacacactctgcgcagctcagcctggagaaggcccctcaagcagcactactaggaaccagtgcgagccccagtggactgagataaaagcaacaaaccaaaacagcaccataaagcctctgaaaaatggtcactggaaccacagctcacaaatatatgctagtacctacatgctataccttaacaggttactactgaagttaaaatttttaaaaagtacagagtctcctgatataataactaaaatgtccgagacacaatccaaaaattatctgtcataccaagaaccaggaaaattacatgaaggaaagaaaacgccaacactgggatgagtaagatgctgaaattatctggcaaggatcttaatgctgccatcagagaaatgatttgacaagcaattacaagttctactgtttcaaaaacgaaacaatagaaaatctcagcaaggaaacaagatacaaggaaaaaaaagcaaatggaaattatagacctaaaaaatacaataggagaaaaataatcattagatgggctcaacagtagagtgaagatgacaaaggagagaaatctgaacaaaagagagaaaatagactgaaaaatgaaccatgcctcaggtccatgtggaacagtaacaaatgactcaacatttgtatcattagaggcctagaatggagaaaagagtgacgctgaaagaacacctgaagaaataatggttgaaaattttccatgtttggcaaaagacacaaacttacagcttcaagaagctgagcgaaccccaaatagcacaaataaaactattctttgggaataaagggaaaataaagtcatcttcagaaagagaaaaacaaaaagaatttctcactagcagaactgcctttgaagactggctaatggaagtaataaaagatggaatcttggaaaaaataatggaaatagcagaaacatgggtacatacaacagagcatcactcccttgataagttctataagtcatattggataactgatacaaaaactgtaatagcattaatcctcaaaacaatactatttaaaagtggggaaagagacccaactgaaattaaggtttccatatctcattccatgtaatggtattgatggcagtgaatggtggtaagtcacattatctataatgtgatacccacaatgaccgtgaaaacaactataaaaaacacatagaaggccaggcatggtggctcatgcctgtaattccagcactttgggaggctgaggtggacagatcacaaggtcaagagttcgagaccagcctggccaatatggtgaaacctcatctctaataaaaatacaaaaattagccaggtgtggtggcatgtgcctgtagtcccagctacccaggaggctgaggcgggaggattgcttgaacctgggaagccgatgttgcagtgagctgagattgtgccactgcactccagcctgggcaacagagcgagactgtgtctcgaaacaaaaacaaacaaacaaacaaaacaaaacccaaacactaaataaatcaagggtcttaaaaatcttaaaaaatgttcaagtaatcatggaaggcaataaataaataaccataaacagaagacagaaacagaaaacaaataataaaatggcagacctctccctaacatatcaataattaccttaaatataaatggtctaaataaaaaaattaaaaggcagagactaacagtttttattaaaatgacaactatatgctgtttacaagagattcgtttcaaattcagcaacacaggatgaaagtaaaatgatagtaaaagacagatcatgcaaacattaatttaaaaaaaaacaaatggttacactcatatcagattcagagcaaagaaaatcgcaaaacagaaaaaacttatataatgataaaggaccaatcaccaagacatagtaattctaaatgggtatgaaccaaatgatagagcctcaaaataaatgaaacaaaacctgataaacagataaatctcagaagcagacctatataaatattctcaagtgatttttaacgtatgtgaaaaaaacaattcaatgaaggaagaacatacctagaaaatacataaggaacccttaaaactcaacagtaaaaaaccaaatggactcttggtttttaatcccagagaaatacaaactttttgtttacaagtaacatcacagttaatggtaaatattatagtctctctcaataaaatgaggaataaagtaagaataccttctaccaaaggttctagccagtgcaatagaggaacagtaataaataacataaacattggaaagaaagaaacctgtcttgatttgtagatgacatagctgtttactagaaaaccctatgaaatctactaaataactactagaataagtcaatttagaaaggttataggatataagatcaatatataaaaatcgattttatttcaagatagtaataaacaagtgaaaagcagtatttaaaaaataccactaatagcattagaaacatattttaagtttattcctaaccaaagagtacatgatttcaacattaaaaactataaaacagtgctgagataaactaacaaacatctaaataaatggagagacgtacggtgttcaaggattggaagaatatattgttaaaatgtgaattctctccaaattgacctgccccagtcaaggcaacccaaatcaaaatctctgcaggctttgcccttttgtttgtaaaaattaactgattctaatatttatatgcaaataaaagtcaaagcaacctaatgaaaaagttgtgggactcacagcatctgatttgaagctgcagtaaccataacagtgtcattttggcaaaaggacaaaacaaattaatagaacagaatggagaatccagaaacacggctcacacacagattgattttcaacaaaggtgcaaaggcaattcaatggggaaagaaaagtctctttaacaaatggtactggaacaaataaataaaactatttagaaaatgaatgacatccactgtctaacagcatcacaaaattttattggtggtggatcacagatttacacataaaagttaaacctatattacacaattagaagaaaacataagatatttgtggctttgggctaggcaaagatataaaaggacataaaaaaccataaaagaaaaaataaattagacctcaaaaaatgaataatttctgctcaccagaagacacttaagaaaatgaaaacttggagaaaataatcataaactacttatcagaaatgggccttttatatagaatatacagtattccccacttacccatggggaatacgttccaagacctccagtgatgtctgaaattgcaaatagtactgaaccctgtatatactatgcatgatttatttttccttcttcacaatttcatagatacaatactcatttttaccatagattttagcaacctcaacatatgatttttaaattctttccttaaaggaagcactttccagcttctctttggcatatatattcgaatttccaacatcactgctcttgtgctttagggccattattaagtaaaataagggttacttgaacacaagcatgtgatactgcaacagtcgatctgataaccagtagactaaaagtggtgggtagtctagacaacaacgatatactggaaaaagggataattcatgccctgggtggaaaggtgggagatttcaccatgttactcagaatagcatgtaatttaaaacttaagagttgttggctgggtgcagtggctcacgcctgtaatcccagcactttggaaggctgaagtggaagaattgctagagtccaggggtttgaaaccagcctgggcaacatagtgagaccctgtttctacaaaaaaataaccaactaaaaattagctgcacacctgtagtaccagctactcagagggctgacgtaagaagattgcatgagcccagatactcagaggactgaggtaagaagattgcatgagcccaggagtttcagtttataacaatctgtagtcatgctactgcactccagcctggatgacagagactttgtctctttaaaaaaaaaaaaaccaacgaaccaaccaaccaactctccctgccctgcacccgccaacacacacatacatcaaaaaccctgaattattcatggaattttctacttaataaatatttttggaccactgctgaccaaagataactgaaaccaaaaaaaagcaaaactaaggataagacatactgctatattttaagaaaatatctatagtcaatagaaatacaaaaatccaatattaaaaatgaggaaaagacacttttagttaaatatgcacctgctatatgctttggaaactccactcctacatgtttgcccaggagaaataaaacatttccacaataagactacacagctttattcacaatagtcccaaactggaaacaatccaactgtccaccaacaggtaaaaaaaaaacactttgcgtattcatataatgcaacactactctataattttttaaaaggcactataaatcaatgcaataacatggatgaatctaaagagtcttcatgcagtacaagtacataagattccattcataagaaattctagagcagacaaaagtaagctacagtgacagtaattaggacagttattgtctgttctaatgggggatggagattcactggaagggaaaacatgggaactctgtgctgatggacatagtctacaccttgactgaaatatggttacataaatgtaatttttaaaaactaacccaattaagccctgggtatttcactgtattcaaattttaccccacacaacatcgacaccaccattattaccaccacattgataacattcagagagcagttagggaatcacattattttgaaaattagtaagtaatgggaaagaattaagcattatcgtatatgatatgtacatatttatatacatgtatacagatcctatatgtggatctgtaatttagggtagtcatagagttgatgagaaagagtttttcttaagaagtattacaggtaataaaggaaggaggaataaagaattcgagtatcacaattttgtaaccctcaatgaattagcagatctaggcaatcagaatccacgataaaaattactagaaaagacagaaagcgagtgagacttttaagttattcctacaaaccaacatctatgaagtatttgggaaggaaataaactctgaatctgtttttcgtttttttgagatggaatctcactctgttgcccaggctggagtgcagtggcacgatctaggctcactgcaacctccgcctcccaggttcaagcgattctcctgcctcagcctcccgaggagctgggattacagctgcctgccaccaaacccagctaatttttgtatttttagtagagacggggtttcccccatgtttgccaggctggtctcaaactcctggcttccggtgatctgcccgcctcgggcgtttttgcatgtattttttcaggtgctgaaaaagctctccctgatttcatttcttgttgactgcttagagacatctttccaaatgtccttccttgtcactttttcaaagttaggagcagggattgcacgtttttttgattggtaatttttgtttcaaaggtttgattcagattcagagttgattttgctaggtatggtggctcacgcctgtaatcccagcactttgggaggccgaggcgggcggatcaccagaggtcaggagtttgagaccagcctggccaacatggcaaaacccttatctctactaaaaatacaaacattagccaggtgtagtggtgtgcacctgtaaccccagctactcaggaggctgaggcaggagaatcacttgaacccaggaagcggaggttgcagtgaactgagactgcgccactgcactccagcctcagtgacagagcaagactgtttaaacaaacaaacaaaaaattaacaaaatcttatttctagtggtttacatattaatgatgctggcaacttttagttgaaatgtattaaacagcctcgcagtttttatttttatgaattctgcatacaataaataaataccaaccaaaatatctatacaggcataccccagagatactgccggttcagtttcagaccatggcaaataaagtgattatggcagtaaagtgagtcacacaaatttttttgtttcccagtgcttataaaagttacgtttacattatactgtagtcaagtgtgtaacagcattgtctaaaaataagtacattatcttaatttaaaatcattgctaaaaatgctaatgaagtgagcacattttgttggaaaaatggtgctggtagacctgcttgatgcagggttgccaccaaaaaaactcagtatctgcaaagtgcaataaagtgagatacgcctgtaatgtcttttttctcttctgttattacaagcactactttaagtcttcaactaccgaatacttgtagactatttaatgaattaatattttcatcatatttatattgagaaaattaagaagctgaatttagttagaaaaggtttagaatatcatcaactcttgaggatgagttggaagctactttatctgtcatttttcacataacactagtttgcccttcaaatcatacatttaaaaatgatcttaagatacataccaagtagggattatgttgttataaaaagctagaagtaaaattaagactttaatttcaaagataatttctctataaagaatagcacaagatatgttcaactattctcagagatgcatcaagatatgactttttttcctactagaaattatatctatgatcaatcatattacagagatattgctgttatactccttgtgactgatgaggggggtttttcctatcaccatgttatcccaaccctttaatgaatcacctttgaaactcagaacaggtagcagcacagaggttgctaagagtaaatacattcaccactgctgccagaaatgaccaacggtgcaccagaaagaagaaatactggtgaattcccacataccacgacgaacaaccttataaaataacagaacaaatgaatataaagtaacatacagccatcccttggtatatgtgacagggattggttccaggaccacgtgtgtataccaaaatccatgcacgctcaagttctgcagttggccctgtgaaactggcatgtatgaaagtcagccctctgtatatgcaggttctgagtcccaccaatactgaatctgctcttagttgagaaaaaaaatctgcatgtcagagggcccatgaagttcacagctgtgttgttcaagggtcaactgtaatataaaaataacatttattgctagatagagttgatattcattctagtgtttatatacttgagtcttagagcaatagcctttggagacaacttccaggaaggtacgtgtttgcatgccttctcactgcaatccatcagtagctgccacttgaaccagtcttagcaggggatggggaagcctatgtctttcagaattggatgatgtagtacacagaagtagacagtagagtagtaagggcatttgcttaaaagcagatagaactgggaacctctacatctttctgtgagaattcagggcttagttttttagggtgtaaaatggaaatactagtatgtatctggacatattatcttaagaattaaataaaagactaccatttcactcaaaaagtgcttgatcctgggaagccatgtaacagttcacaaatgcagagttcaaaagaaaggaaaaattgcagacatggtagccttattttaattatcttctaaccagcagtaagcatactctaaccagtgaggaatactagataatccatacgccaaatgcaggagattacatgagacttatatataacaacacttcattcatgaaataaatcacaagattagctctgaaaaatggtgattatattacaaatacaaatctaagtatatagatgacaatttgtgagtttgcttatttgggaattagtacctagagataaaggtctgaagcaaaatcacacacccctttggtgaatcaaatcttcctctgaagaactaagtacctcacctaatcagaacagagtccctggtatagccaccgtcatattctgtagtttcttctagtgcttggaaatctagattctgcaaattcaagaaaatatgtcttagttatctgctatactactgtatcattacaaacaataaatcgatacatgactttttgcagacacctgctttcttacccggcttccacatataagcaattcaatttcttctggtctgaataagtactttaagggagattcattggtcaccatatgaaaacctctccgaaaagccttgaactgtttttctactgatttattgagaatgtagtcagaataaagattgacaaattcctgtagaaaacattaatcacaagaacttcttataatatgctatgcaaacaaaacacaagttattgggctgcatagctttttaatttttccaagaaaaaaacattcaagaatattcttaaaaattcaattttacacctacttcttaacaatttcacaattctctgttatagccaatattaagctatgaaaaggccatatacataaaactgtcaagaatattcttaaaaattcaattttacacctacaaagaaaactacttcttacaatttcacaattctctgttacagccaatattaagctatgaaaaggccatatacacaaaactgtcatacttataaatgtcaatttcgataatgtattaaacagaactgaatataaatgctggagacgcagaaaattctttaggttctctcaactaggtatgtaaacagacacatttaaaccatgtatccatctatttataaatgccaaccgttttaagagagtacaatatatttgatttaagcaaaccaggaagtcccaagttttctaccatagaatatttggtaagctgcctactgtatccagttcagcaaaaatgtggaagtactgactgacacataaactactgtatcaaatcataaaaggaaaatgtgctttgtacccttagtgtgtataatatttaatcaaaaaattatatcaatataaacatgtttcttaaaggtatactatatatttgtcataattttttgcttgttatgttctgggttattcccattcccgatgaacacattttagtcaatagaaacccaaatctgacgtaaagtatacttttcagaaatgtatttttatcacaaacaggatatacatgtgtaaattaaatgtaatttttatttgttctgtgataaagaccttaatcatgaggttcctgcttacagcttaatacaagaaacaccctgcttcttgctttatactacaaccacacttagctattaactatctcctgcttcatgtcctctttctctaaaaggggctttagtgcccaactgtgtgctttcataccaacttatatccaagatttagaaaagtggactctagcatttacataaacttagttacttgttttttttttgtacagactatattagatacttctttaaaaattataagcatacatgctttgaaagtgttaatgaagagacaaaatgtgacataaaaacatttattaccttcctgttttcatttgtaattggaattttatcaccattttcctttagatcatacatcattgggttaccaaaaagatctgtctgtgatatctggaaagtgatcatcatgtcatcttccacattcccttcatactccaataaatcttttaaactctgatatagaacctagcaaccagaaatggtaaattgaggccaccatagaactacaaaatacaacaaataatttatatcactcttcttagaagacaacaaaaatcttatcaataaaaattgtaaaaagtgtagacagtatccctccagtcccccaaatagtttccaacctataaaagaaagattgtcagtcactgtgatgtcccattctctgctgagaaaccccataccaccaatttagcaatagaattcacactgtgctctatgagaaattctgtggtgtctcaaggtgggggtgggggtggtaggagcaggcacactcgttgtaactaccaagacccttagccagggctactctgatttttacctatctcttaagatttcactaaaacacaaacaaaatgtttagaaacacttctctatgaaatcaatcttacaaaagcttcgtgctgacagcaatatataaaaatgtccccctttgagtttttaagtgtttctggtacttcggtcagattaaaacatttttatcttattgataagagtatcaacaaagattctaaacaaaaactttaaaattttgacataaattaaatttttgcatttaaataaaatctaagagactgaattaaaaaaatgacaaagaacttactgggtgagagtctcccaagtcacgaaaagttccttttttccccattagcttcctgtagacaaccatgggaaaatgtacatccagtatacagttattgtaaatagccagacccagtactatgccaatcagagtaaactgaccctcagtttcaaaagaagatggattaaaccaaaacaattttgtagattcatcgtatgtgaacatacctataagaaatgatttttaaaaatacattacttttgtattttattaaggactgatgaataatacaaatataaacttaaaataattatgcatataaaacatttaaaatatatgtaattaggcatgcaacattgatttctattatattagcacttgagaaaacaatgtccacatatatctgctataaattggggtgaatggtgatatgtaattttatgaagccaaaggaataaagtagtaagtaatttggtggcatcgggtagaaaaatacgttaattaaattcaagctttctaattttctactaacacataagaaaagttatattcatgctttatccacccatagctgaaaaataaacataaaaaaacaaaaaatggctacatttccaaagtgtttcatttataaaaatataattacttatatctgtaccacacgtactatttttgaaaacaatttttcatttttttccttgagatggagtctcgctctgttacccagggtgggctggagtggcacgatctcagctcactgcaacctctgcctcctaggttcaaacaattctcctgcctcagcctcctgagtagctaggactacaggtgtgcaccaccacgccagctaatttttgtatttttagtagagaaggggtttcaccatgtttgccaggatggtctcaacctcttgacctcgtgatctgccagcctcagcctcccaaagtgctgggattacaggcgtgagccaccacacctggcctaaaaaacaatttttaatcacagtaaagaaaggttcgttttttcaaaattagacaatggtgccatgaaatttttctagcattttcctaataaaatcagatgatctgaaatacataaacctggataaatctgatgaacttagataaacaaagctattcaatacacatgttaattatgggccaatacgtaaaagaaaagtagtttcgtagtctttcaatttcacatggtcttcactatgcaagccccaatcatggaggcttttttttttttttttttttttgagacggtctcgctctgtcgcccaagctggagtgcagcagcactcagcttagtgcaagctccgcctcccgggttcatgccattctctggcctcagcctccggagtagttgggactacaggcgcctgcgtggaggccttttttatatcactcattggaaaattggggcccggtgtggtagttcacacctgtaatcccagcactttggggaggctgaggcaggcagatcacttgagctcaggagttcaagaccagcctgggcaagatggagaaaccccatctctacaaaaacacaaaaaataagctgggtgtggtagcatgtgcctatagtctcagctacttgagagggtgatgcatggggatggtttgagtcttcagcctgggaggtggaggttgcagtgagccgagacagaaccactacactccagcctgggcctcagagccagatcctgcctccctccaccaaaaaataaaagattaaaaaaaaggaaaattggaatctttggaatgagtactactaaaaattgatttcttcccttttaaatgactaaggaaaaaaattttaattgaatttaaatcattttactacatgtttagttgctactgtgaaacaatgaaaacatcttaagaattaagtctgaaaaaaatctgtaatttccaatagaaaagtagagcttagaaatcagaaatcaaattatacagtatataagtattttaacctgtttataagaattttaaaatctttgaaaatgtcattgtcactttaagtttaaaaataaggagctttaacatgtttccttgatcactaggagtatgaattaagcttaggacattttctgaatgcaaaatggtttgaaaattaaacaattcatatttgagtttcatggtttctatctaaacattttttttacaggccaagttacaacatccatggaaatgcttttagttataagtatggtattaacaggatcaagaacagctgacaaataattacaattaataaatttgttcaagctgacaatggtgtgtctaaaaaattaatgaatttaataaaatgtcacaaatgcccttccttggaaccaagagcaacaagctataagttaatcagaatataactctgaagttccattttaggcacattttctcatgttccagggagaaaagcaccataacctcctggtaaaatactcctttttgatacttctactgccatcacttcagttatcttactggaactgcttaatctatgttttttcttacaagtatttctgcatataatgcaagtatgctttatagctaaggtttaacatttctagatacatcaaaagctagagctaaggtttaccaaatttaagaactttatgaagtttataattttctatctcaaaaagggcgtcgtcttatgtatctctgatttacttagaacaaactacatacaaatggcatagctttttagttattaataaaacactagctagattatagataagggatgcgtgtgtgtgtgtgtgtgtgtgtgtgtgtgtgtgtgtgtgtgtgtgactaagaacagtaacagaaaggtcaactcaattagaatcaacaggctataacagctcaaatctcaaagctgaagggaaatgacatacattattctatgcacactcctcacaattctgatggtaccttcagtggaaaccttttcctgtaattgtcatgtactcaattttaaacgtaagcaagctcagttactaagtggttatatttacagtagaaactgaaccagttcagaattatgaagttaagtagactacccaaaagactgcatcttttccctgttctactttatcacaaaagggaaaaaactaaaattctgatccttcactttcaaatttccaaatcccatcagcctttcccaaactgtgttcaataacaactcttctgttagggcagaaaaagagttctggagttcaaaaagtttgggggaaacactacctatattaagccccaagaaatcttatagcaaataaacctaattaatgtgatatcagctagtgtttctgaactttgagcatgacatacttgtgagacagtctctcaatactcttcaaaccattgttctttgaagttcacaggtcaggaaaaccgtgagtttgatgatggttttagacaacaaaaagcaaagaaatccctccaactgttccaatataccattctaaagtgctttcaattcagtttaccaaagagataatttccttcattagaatattccttctaagaaataaaagaatttgaataaattagtgatacaaatcagttcctaaaacctacaaattcagtcatgatgtgtgattctgggtaatccataccaaatccttcttttgctgctcttcatagctgaaaatatttacaaagtaagataaacaaataactaactcaaaagatgatacgacaccataatcacattactaatgtatttaccaatatctggattgaagatttcctccacaaccagctgaaaaaattctttggaaacacctccctcatcaactccttgttctccttcaaattccacatacaactgcttcttcaagtctgcaggattttccatagcgatcatctctagctagtgattgaaaagataaacatgaaaagaagatgattgctagtatcaggaaaaaaacaaaataaaaacaaggagtaggattaggaaacaaatacaaatttttgactttttgtatgtaaatggaaacagaaagcaaactgataaaaagccagtgaagacaaagattcagtcttaaagataatcaaaaagacagacacaaaacagacactagcatagtaaaaagctaactttactgatttgttatgaaattaacatacaattaattaagattttattacttgtgtgttaagtctggactacacaggacatggaaaagcagctaaatcatttcagcaaaaacaatggagtagaggtctaacctcaaaattgttcattagtagtcctttattagaatagaaactcaagggttaagtcttagtatctactaagtcataagtaaaatatttcaattaagaaaaatacactgaatactaaagcagtttatggtctctcacagtaagacttagtataaattaccaccttttaatggactagaacccatcttatatccacatttccttaaaaacaggtgagacataaccttactcatgtccttactctttttttttttttttttgacatgaaatctcactctgtcgcctaggctggagtgcagtggcgcgatctcagctcactgcaacctccgcctcctgggttcaagcaattctcctgcctcagcctcctgagtagctgggattacaggcaggcgccactacgcctggctaaattttttatttttagtagagatggggtttcactacgtttgccaggatggtcttgaactcctgacctcatgatccgcccacctcagcctctcaaagtgctgggattacaggcgtgagcaactgcacccagcccttattcttaaattgtaagttaacaaactttagtgtctagcattttctcaactataaatcttttaccaaatatttttgtgtacctatagaattatgaatatacagtaacctcattgagattaatcataaaatcaacactagattccaatattaactgtttatactgcattttgtttgttttactttatgtatctaaaatttgctaacagtatgactgtatccagtacatggatggatactgtatctagtacatggatggatactgtatccagtatccatcatatctcctaacttgccttcaaacatctgttggctggttaaaaaaatttaatcttggagatgaaaatttaccaaaacaggatattaaatgttttcaggttattccaactatttcaaacagaattttaaaaatggttttgaaaaatgcaataatcactgaaacaactgtaacacagcactatagtagttaaagtaataatactcatttggacaatctagtctgtctacaaaaaataaaatctcataaattaacgcatcaggtcaggttgcccgagagcattgttttttcaaacttgtcacctgcaactcattagtgggtagtctaatccatttagtggtttgcaatcagcaatgggaaaatcagaatgcattccacatagtaatggaacctactgttttgtgaaacttttgtttcaattagatgtacagatggataagcatgtactgggatgctatgtaaaatactagggattgcagtcaaagagtttgacaaaactagctgaaattatcttctgggtatcttcaactttagggtcctattctgtgaatttagtctttagctttaaataatgtctgttgttgttcaacaccgatctctaatatttacaaaatcatttttaggccacacagtttacttttagacaatgttttgttatggaaagaccaagagtcagtcagaattcaccttactagtcccaactctcacttaccataacttttaacctttaaactttagcacgcgattcaattaagcctcagtttcctcaacatactgtaagttgtgaaggcttattaagaatatatgagaacgagtgttaccttttaaaatagttttgctctctgaacaacagatttgcaattttgtgtccccaaaggaacttgatatagactagttccaagatctagagtcaaacaaatgtagatgtgaaaataaccttggggaaaaaaatagtttcagttggaaacctgtttcaagctacggagtatacagaattctgaggagactaaaattagaattaacatcttagctcaaatgtgggaccaggccaacattccatattgccatgtaatccattctgagtttccttatgccagttcccaactggctaggtgttaaagatgtaagtcagtgtttatatttacctttacatccaaaggtatacttgcttttatcaaatataatgtattccaaagtggggaaaaaaaaggttatctggtatttagactgtgcattctacagcttttccccactaacattcatagatgagagctgactccttatcaatgtaaaaccttttaaaggatgtggtggtgaatttctacaggattgagaggccctgtgttctatctagtcttagctctacctaagacatgtcaaatgataactgaagcaaatttatctttattctccataaaatattacatgtctgtccacttccactgatctctattctatgctccccaccttggtgccaaaagaatgtaatgcaatgcaatatgttctattgtaaatgcaaacatacaactttacctctcttatttcatctgtaaaataaccataataatatagtaataaattaatgtatgaactgcttagattaattccctgcataaagttagtgcttaaaagtactagctgttgttgctgttattttattggttctaaaatattttctgaaaacctaccatagcattatagaacaaaaatattccatgaatacagcaacaataatatatagcacttttgtagcatttcacacatagcaactaatttaatcttcacaacacccttatgaggaaggaaacattaactccactttacagataaggaccccaagatactgaaaggtgaaataacttcaagtcacagtaagtcacagtaagttgtggaacagagatactaatccaggaaacaagctcttaactactatgctttactcactctcttcaatgacgaccaaaaattttttttttaggattatgagtgatttttattttccttattcttttccatatttttccattttttacaacaaatacatttttcagagtcagaatgtgttcaaatataaatatgtaaaaagaataatttgaaaagtagttggtaactgaattctgtaggcaaaaattttgttattacctattttagattaccattctggtacacataagtgatttcataaaatactgtaccacttaagaataaaggctgggcgccgtggctcacacctgtaatcccaccactttgggaggccaatgcaggcagattgcctgagcccagcagtttgagatcagcctgggcaacatgatgaaaccttgtttctacaaaaaactaataaataaataaataaataaataaataaataaataaaaaatagtggggggtggtggcatgcgcctgtcatcccagctacttgggaggctgaggtgggaggtcaaggctgcagtcagtagagatcgtgccactgtactccaggcctgggtgacagagttaagaccctgtctcaaaaattaaaataaataaaatagtaaaaacagaatacataaatagcctttaaaactattttattttaaattattaacacataaaatttagcaataaccattttgataaaggccattattgcataaacagctgtactgataattctttttcttaaaaataacctccatcaattgttcggtcaatttaaaaaagatttaacaaataaactgtaaaggtgtattctttacataatagctatattatttaaaattgtatgttgttgtttaaacccaaacctcaccataaaactgtattttttaagtcagaagttgttttaaatgcattaggatatttgaaatttggaggactatgtctaaacattctgaaaaggagaacgtgcatgcatgcctgaatttatttacaatacacacgtggatttttagggttttttttgtttgttttttttttttttttgagacggagtctcgctctgtcgcccaggctggagtgcagtggcgcaatcttggcgcactgcaagccccgcctcccaggttcatgccattctcctgcctcagcctcccgagtagctgggactacaggcgcctgccaccgcgcctggctatttttttttgtattttttagtagagatggggtttcactgtgttagccaggatggtttcggtctcctgaccttgtgatctgcccgccttggcctcccaaagtgctgggattacaggtgtgagccaccgcgccaggccaatttttaggtatatttaaaagtacagtgtatgttgtatttatttaacatggagactagcaacagacagagattactggggaaaaataaacaaaaatatcctggatataatcatatctacctcttcactgcgtaacttcctcttctttaagactcttgatttcatcaattgctggataaaatgatttttaatttctgaactttttaattggccatgatgatgaaatcctagggagttcattttttaaaaaaaaaatctgacctgatatcaaagcatttgcagaatacctagcaggatgacatcttaatatcaaaatatgatattactagacttacaggaatcaaaaggaaaaccttatcacttaaaatcttatagttttctgagctattacatcaaatcaattcataattttttaaaaaaattccttaataccatgaatatttaagtagaagcaataatcagataaaagagacctctaatacttaagaatgcctgggatttctaagaaaggctagcttcaaggccgggcgtggtggctcatgcctgtaatcccggcactctgggaggccgaggcgggcggatcacgaggtcaggagattgagaccatcctggctaacacggtgaaccccatctctactaaaaatacaaaaaaattagctgggcatggtggcaggcgcctgtagtcccagctactcgggaggctgaggcaggagaatggcatgaacctgggaggcggggcttgcagtgagccaagattgcgccactgcactccagcctgggtgacagagcaagactccgtctaaaaaaaaaaaaaaaaaaagaggaaaaagaaagaaaggctagcttcaactacttcagtcaacttgaggcttaaactattgcttgagatttccagattatccaaattaattttttcatgttcacgataaacacatgaagaaaagtctgttatatctcaaatgtagtttaaatgtttgggtaacaccaaatcacataatcacgttcgtccatgagacctggaatcctgacttctatttccaattctgccattaatttatgtaggctggaatctcttttagatttcattttcctcacatgtaatactaagtttgatgtttcattgtcttaaattattatataatgctgaggatctatgtatatataggcttcattctctcattcagtttctgagaaattactttgagggcataaaccaagcatatttcttggtttcatttttgatttcaattagaataaatcacaagaaagaacaatggaaattacatgttaaccacaatatagtgtatgtgtaagacaaaattaaacatacctagtgcagcacagaataatctcatttttaaagctctgtgagtcaatgaataaataaaagaattacgttcatgtttcactagtaagagtgttcaccaatgctggaagctgggagctgaaaatgctggaagctgggttagactaggctattagaaaccagataaaaagggccagtgacttttagaggggattttgcagaacctcctggtagtggggctttttatctgtgccaatcacctttatctgtgctaattcctatttttgaacttccctattcaattccacatctcagccattccttttggtttttagatatttatgtgaaatgctagaactccctgactaattggaaccaagtttcacatcatcatcatcctctattccaagcttgctgtccccatgatcctcttaaaaatctgagtttccaaaacacataaacatacttgtatatcaaaatggcctttctctttctctctatatatgcacacatacacacataaacacacatgcacacacacccccacctgagctgaaccaaaggccatcttcccaaatattggagtctggctttatcaaaatatttgtggagtattaccagaagttcagattcataggctctacaatacagcttctaatctaaacctctagaggttagggccctggattttatttatttatttatttattttttttaaacaattttcccattcagatgtgaaggcagtttgagggacctcatgatggcaatactatattcttccataaacttataacctctatcttctcctttaagaagtaatttaaaaaatcttaatacatactatcattggaagtgcttcatctaagaaaaatgagaaattatctacttgtaaaagaacacacaaatgggtatatttacatatttgtaaatatgtaaatatttacatatttgtaaatatgtaaatatttacatatttgtaaatatgtaaatatttgcatatttgtaaatatgtaaatatttacatatttaaattaaattaatttacatattaaattaaattacatatttatattaaaaatgtaaatttgtaaatatggttttacatatttgtaaaaacctcatcacattaggaatgtcattcaaatgaaaggtgaagtctaagctcatgtttatcactgtactgttttctaaggaacaataacgaaaaaatactgaaaataagtcctaggggaactatggcagtaagttaaacgggtagggtgggggtgttcttaagcagttctaaggtatttgtgaagagacaacttatattctattgattctaaaattcacttttttcacattatctctgaaatcagattacaccatacaaatgatagcatcttacaatgaattgctggtatttttctgtcttagcagtaataaaatgatagtgtttcctacaatcagagattagtgaaaatactatcaacatgaattcttctcttgtcatcaaagacaatttctctaaaaacctcaggaaaaaagctgctagtctggtttgaatttcacaatatataaaagcaatgaatatatttttcttttttaaaaaaatccacaattattaattcaagttaccactcctcaacagaaaacatacaagagtctcatatatgaagtcactattttctgggcttgatttctaaactaaggagtggataactctaaggtttcttttagctcttaaagcctaggatcccataattttatttatcaatattaagcttaccacaaagtttctcatttcttcttttccacccaaccctgctatacaattccaaaattagcaagtcataaaaaagtggccactagtttgttcactgtgatatataagaatgaggcttaaaaagcagagatccttgggaaataagatcttgaaaaattcatcacttttgagctttcatatgagagaataatcttaaaccactttctattatagaacttctactatgtgttactaaaatatgtggctttatcataatcatcacctgctgtgaatacttacttcaaaaaattacacaggttatcaattttacttataagacctatttcgatgctggtttttctagtcttttcacattctgttatttttttaaaaaaaagaaaaggaagaaaaagcaagggagaaagaaagttaagagtaaaatctgcttagtgtgagcattcagagcccctaaggaagcttctctgtaagcatcatctctttctattttcacagtttattaaactgcctaacacacatgatttctgaagtgaactgcttttgtgggctggcaatattcaagtacatatactatctagtgaatcctgatttatgataggccacactatattatctaattttgatataattaagcagaacttgctaaaaacaagttaccataattaaagagctcacagttaattttacactaacacctaaggctttaaaagcagttgtttccttaaaattctagaatagaatttaaaatatagaataaagtatataccaagtacttaaacttttgtttttagtcttgctttactagagaaaaaaatgggggactgaggaaaataagactgagtagacttctgagcgaaagacagataaggaaggtagacaattttttgaaccctggaatgattcttacagtgtaatttcattgccttttaaaggctagacatagcttttgatgaagacagctgaagggatctcacctcaagaagccaaacataaagtatgtagctttggcatttgcagttctgctccaacaatggatagtcatagacagacctcaacatacctttcataaaacatcactcacattcttataaaataccctatcattctgctaaactatgtaaagtaaggtgctggctgccttatgatcagtcattaagtgtattaattattcatgtgtctcaaaactatgtaagtgaaataaaaagggtaccagaaagcaagcaataataatgacttcaggcagttaaagcccccttttgtctctgctagaaaaccacctgagttgcttaaataatgcagaatctttctccaacactataaacatatctgacattaaaaaaaaaaaacaaaccagtaacaaaaaaaaaaaaaacacacaaaatctctgcaatttttaatttctgagatgtcaaataactttttccaccgggctacagctttatgaattctcgaatttagacaattctaaaactaaaatttagacattctaaaactaaaatacattttaaagtaaaaatcacatttcctagttgtctgtgtcagacaactttactagtatactatagtattattaactaccttaatttttgttgacattaaattttacttgaagatgataaaaaagtagcagcaatgacagggatagctaatactagaaatacaataaagctctgcgataatgcacctgagacaaatgtaaattttggtgaaatgtgactgacgactgctttctgtcttctggccactcttatattcttaaacagatacactaaaattatcttgtggaggaaagaaaaggaacaaatggcaaccccatctggaaaaccaggaagttaggatgagtacctgagtttccagtatttccctgctcaatctccctggacttgatgttacaggcaccactaatccccagatttttggaatagctgctgttttccagaagttccaagacccagagttgtctctatgaatttttaagtgggaagaaactaccacagccaggcagtgccgtccacacagggatattctaagtggcccagcaggactcaactcttactggcaacaggcactgatctgccatggtcacttcatcaagtccacaataatgcaactctgaattttacacgatggaattttttggacactacctataattttatggtatggttttactgtaccattactcccagttcaagactgcacatccacacttattattgggtatctccacatttctcttgttctggtctttgtccaacactctattctcttctgaatgaaagaaactttggatttagttttcaagatttagaaaacccattctttttcaaagatagcatgaccattatataatacaaccgatactttgtagaacacatctataaacttgcacaggaacaacaaaagtataatacttatataagatcagaaatgtccatgtgttcctatgctatatggtatcatttttttcagtcacttttaaaatgaattcactgaactgtatcatgatatccccattattaggtttttaatctagcagcccaacttacccggacaagtgcatcatctatgatatggtcacgtctaactttgagtctcaaatatggattcaactgctgtccttgaactaagctgtagagaacagtgattcttcgttcactgtacatgcgaattctattgtcataatataatcccaaattctttgtgacagcattcaatataaagggacatgtcataaaagagaatttgttctctgtttctactttgaaaaaagtataatctttatccatttctagaacctcattcagtggttcattaataaactcttcaaaagggataagtggttttcgacaatccagggttttaacaccaagttcagtttccagggggtccactcgaggacctttcttgtttcttctttcttctcccaaaagttcctgaagtgtcagctcgctggactcagggatgggctcttcatcatcttcttcattgtgatttgtgtccacttcccctcccactacatttgcatagtaaaccattttcaagcacttcgaagcagcaacaatggcatcatcatcattcactagatttcgactgttaaattcattgcttatgactttataagtaataagttgctgaaatgtctccatcattctccgaatctggtctgcattgtatttagaccacagtctgatcagttttccttgggctgcaaggggtagcttgctcatcgctttgcaaaataatggcaaagccatttccagatattcaggactgtggagatttctattctccattacgataatgaacaaattcagataattaggatctcgagagtatacattgtgatacgtcaagtcacattccacgttaggtgacaaatatacaagtgcattgagaaaggcagtttcaattttttcattagagagcaatctggtgtagacccttctaatggcatcaatatccacagacacatcatcagggcctaatttttgcaaattgttgtctccctgtgagctatcacctatccttgaggaagatgcttctgagtcttcttccatagcagcagcagaacatgcagctttttccttttcatcttcatctttgtcttcatcttttgcttgaagagatttcagttcttccttggtgtgttgtttaactttccggaagctctgtaccaatgcctcagcactagaaaaaactcttccaataacacggattaaaggggaataatcctctctttctctacataattcaagaatttcatataccttctcttctgttaagtaagtcacatctagaaaatcagaggaaaaaagagaacatttattttcataatatgtatgtttactctgttgcaaaaagttctaaaagtaaaacagccaaacattctaggctcaatatcatttatgatatacaactcttaaagtatctaatacttagattcagcaaacaaaatttaatgcttacctatttttttcaatgaactacctacctataccaatgacctcacccatgcttttacattctttcaacaatgtataactcttaataagatcatgagtttaaactttctttataatcaagatatctattaatgtatagctttaattataaatatgaaccaatatgtcatgtactgattaatcataatacagctcttaaaacctcactgtagaacacacagaaatactactaatctgtgagttttcttgtttcagtactctgttctccaaagactaagaaggcaaggtcttaaaaaaaggctccttcagcatctatgtatgtattaaaatcaaactggttcattttgggtcttcctagtttgttccagggtagtcattctgtgagtgattgagaagaatataccatttctcatcggctcttaagtagaaactgctttccacagccaggaatcaggttagactaaatctcatagagtgacagaaaatagtttttgagcaatgaaaacaaacagtgcaaagaagtaaacttatgagctggcaagcagtgcagagactatgtagtcatcaaaatctatttcctcttttcctgggcacagagttggaccacatttcccaactttttgagataagtgttattttcaggccaaggctttctcccttctggctaataggatgaaagatatttcatttcacaggtaaaaacaaatgatatattttgtgtactgaccaacataatactgagaatagtcttaattctcccttttatcaataaagtgacatacttgtcatcatcagattaactacttgagaggttaattttagaggcacacagacaatcctacctccattgcgccaaatatacccttatacatgtagtgtacaacatgtagaatttttaatgactcccacctctgctataatatatgtttcacaatgaaagacaatataaaatgtaagtgatcattgaatggtctccaaaaattgaagcacaaaaataccaaattttatcatactaaggatctgatctgtggcccagctacaagagtaccaacacttacagtttcttttatgggccttaactctttaagaactaattctcaggtttgttctattaagaatatataagcatcttttgctaaacatcagtaacctcttccccaaaagcataaaaccactggaaacctatttctcattattttcattgaaaatttttaaaataccttcttacaagacaatgcaaaactcctaatttcctaaaatgtaacataacagaaaatactactatcctattaggacatgaaacactttgcttcctgagcaagtcataaggttaacaaagacttgctttgcatgcagtaatatggcctgtcctagggatcaccattctagactcacatgtcctttgttgatatgtcatgctttcggaacatcttcaagtgattctgacagtctactaatcctatatagaatgtacctatactttttccaaggagtgttttttgttgttgttttttgacatggagtctcactctgttgccaggttggaatgcagtggcaccatttcggctcactgcaacttctgcctcccgggttcaaacgattctcctacctcagcctcccaagtagctgggactacagatgcacgccaccacaactggctaatttttttgtatttttagtagagagggggtttcaccacgttggccaggttggtctcgatctcttgacgtcgtgattcgcccgcctcagcctcccaaagtgctgggattacaggcgtgagccactgtgcctggcctgtagtgtttaatatgttaaactgaatttttcaggtatatagataaaaattagtcaaaaaacactgtaattagatatgaacattcaaaaagtttggtttattgatacaggtgttctactgagaaagacatttttataagatttcttgtgataaatgtgtccctgaaaatactcaatcttttaaattttgcacttaaaaacctcctacgcaaaaacagtttggtgcagactacttaatacttatgcaactttgtaattagtgttaacaaacataattaataatcaaaataagagtactagtgtacagaaagcatctctaatttccaatatacaatagtaactatagaacaatgcaaaaacaaaaacaaaaaaaccagtaacgaacagggaacagtaacagtagcatattagaaaacagggataaggaaaggtcacaactgctataatgcagacttgagcaaaaagaggagggggcataaagactggataaagccacacaataagcacctctaagatggagcacgtggccaaaagagcagatgagcacattcctcatgtaccacatcccccgcagctggctgcattccactgtgccagcactctacattcagttactggtactctctggtgcacacttactggagaactgtgtacaataaagtcaatgcagcttccacattatactgacacactatatatacagacaacatttacctattttcccatagtgtgtgaactaattcatgaaacagaattatacactctgaagcaacaaagttgtgtaaagtgacgaaaataattttattgtggaaacagagtagaggttataacacaatgccacttcactaattctttcaaacttgattcaaatgatgttagtgaaagttttagaggcaaatgcctctaaaattctctgacttgtatgtcataaaaaaaaagctttctctcttaaaatacaattgcctctgggtgtgtgtaggggtgagagtggaggggcgctaagccctggtagtcattcaaaaatttgattactttgttactaattaccttcactgaagaaaataacttggagttttagtattagcgacaaggtaatcgaattctgaattttggacgtaggaccatttagaaaacaaaagacctgagtgaagactgtcattggtaggtcatgatccttggcagcatgactgtaccaaatgtccggaaggagagtgagaagcatatatctgaaggaaacgtagaattctcacataactatcacaaaattttgtcttgccttcaaaaatggaaaaaacccactgtttcctctttctgcttctttcatcacatcatcctgaggttccagaactcatgccagatacttagtccagttattctataacttaaatagatgttgtggcctagttttggagattcactaccacttaatacatttttcctaagaattttaaaaagttcaaatcaatctattaacaaatgaacttttggcatatgatctgcttctaattagcaatgattagacctgtaaaatgtagttattattcctgtccgttaccacaataaaaaattggttctacgatatcaaaatgtctttatgtcacagaagaaaaaacaaataaaaactaatacatttaaatctcccacatggttttcaggcaacaattctcaattgaaaataaaacatcttacctttaaaatcaattctagcgcctttcttgttcatttttatctcagagcaggagttgttgggggcacctttcgagttctcaaggtaagctgagcttgctcctttcttggagggatgaggatcacagagttttgcattaatcttataaagctcgagggctttaatagctgctgcattattatccatacgaagaaaagttggacaggaagcacaaaactcattcgtgcaggcttcatttccacagccctcagttaactggtggtagtagcgttctattagatgctttgcagctgctcgcttcctgtaccaaacattcaaacaataagcacagtgattagtacagctctcaagtacaaagctcaacatatcatcaaggcaaaagttagtcaagcactgaagtgattaacctgtgtatgaagatgagaagtagaaaatggagatgcactatttaccacaactcctgactagtgaaatagttaataaatattttctaggatattatgataaagaatgtcaatgcttactgactgtattaacagagtatacattcctttggtttaaaaggggggaggggggcttgtctgatggtatatgtgcttaagttgtttagtacaacagctgaaaaatcacaaggtttacagctaagagttgtaggattctatcattttaaaaattagcattaggaaaatgagtctatttaaagcatcaatccggttttcttttacataatcagtatttcatttttaacagcttgtaaacatttgacttatagttaacacagaatatctatctggaataaaaactatttttcccaattatcaacaacatgggagacttaaaaataaatttgtaagtggaatatccaaagatagtgttacactgaaagaaagcggctgcagcctgagtgaggcagatcatgactgtaatcaatcccataactgtgggaggctgaggcaggccgactacttgagcccaggaggtcaacaccagcctgggcaacatagtgaggctactctctacaaacttttttaaaaaaaattagccaagtgtggtggcatgcacctgtagtcccagctacttgggaggctgaggatcacttgagcctgagagtcaaggctgccataagctgaaattgcaccactgcactccagcctgggcaacagagctagactttgtctcaaaaacaaacaaacaaacaaaaaccaaaaagaaaaagaaaaagaggctccaaagtgtagaatcttaaatctaaaacttgtcactaaacctcctcattagttccacgtcacaagatggaatattttaagttccatcacgtgaaatcttatattccttttactctgtcaacttaaagtacacagattaatgtcctattatggctgtttcaggagagctaccaaaactgagggaggaattatgtgaccatgtaagaagttagatgacattatattcaacactaaagagtctatgcttctactaactgataaaattaccataatttcagtagaataaactactggatccaaagaaacataagtcatagccattccttttggtcccaaattcacaagcatggaaataacaactacaaagaatcaaaattataagaaaaatagttcagctgattttcaaaacattcacagaattatctaacatgtaggactagatgaccaatgccagagtttacatcttgctaatcatgagaaactcaacaattaacaaggcagcaagtaagtgaagaaacacacgagatccaattttgtctcaacagaagaactttcactctctgtccaggtaggtgacaaaaagtgataattcacacacattcaattcattctggtgcttatttttcaaatgttccatgcaaatttaccactcactgcatgcaaacagagaaaaaagaaaacccacaaagcacatgtaaaaattgcataaacatgacttaaagacattttgctatctatgaagctataaaccccacctgaaaattaaaaactgttatcacagatttagcactatgcaaaatatgaaagtgaaaacatgtaaaaataaaatggaaatgcagaatctagaaaatttaaaatatatattgctacccttcagtaaagaaagggagataatgtcatgttctcccaaactacagtgacttccctggtgaaaatgtaagtaggtatttcctttctggaggaaaacagtgaacatgtatcgaaagtcttaaaaacacgaataccgtgtgaatgagatcctacttgtggaaaataatttgacaattttacaaaaatgcattgtttctatatctgaaaaaaacatgtctaataaaagattacttaaatgaactgataataggtcacacaataaaataaaaactatcaagatttgaattcgacaaagaactgcctagtcttcctgatatatcactaactgacaaaagtcagttaaaaagtagcaggtgtaggatgaacccattgttatttcaaagcattaatagcattttctctggatgatgtgattaagtgagttttaaaacttcttccatcttttgatttcttatttattctttccatagtaaggatgctacttgcatattaaaaattaataactataaggggaaaacaatagcagttataaaacttcatatacatgatttgaatggccccgagatttactaaattgtctctgatttttaaaaaaattacaaaagtcaaaataccaaaatagatatttttaatgtgagcttttatactaaaataacctccccaaaacttgtcagatacatagtacttctttatatactacataggaggagagtgatcagcacaaacagaacgagactgaaaaatcagaagatctgcattaagtgtcatccttctgtccctaagcagctgtaggatcctagggaaacaattgtctgggcctcagttttcccagctttatgagtcccttcagttctaattttaaagttattttatgtaatagggaggtgagcaagaaactagtatttgctggatgcctgataacttattacacacactgcggggcactttgacatgggttatctcatttgaataccatgacattgaggattatcttcagtccacagccaaagagagaaatagaactggagtcaaatcacgaaaccaagatctcaaagaaagtacagaaccaagacaagaataggagtccaggagtctttcagcttcagagtctaagtcattttgactatattgttttgcagaaggtgattcatttcaaaataattattttttaacatgagtaatactgaagaattctatggaaaaaaatctcataactaatgtgcaactgggaaaaaaatctgaagaatcataacgtgaacctcacatttatgcatctatctggtaccacaaaggcagaccaagtttcttgaggaaatggaaccactatattctgcaaagttaatttctctctaatttgttgaggacctatgtgctatgcattttatagacattcccactttagaggggaataaaccttaacagttaagagctcgcattctgaggccagatgcccaagttcacataatggctctacctcttaattaactatgtgaccctgaatgaattacttgatctttctggacgtaagtttcctcgtaatttaaatggtagtatctacgagcattatcatggtgagagtattattcttcttcacattaccaattgtgagaaaattaaatgtgttaatatatataaagtgcttagaacattgcctggcacatactaagcactatgaaagtgttagctactactattattgttgtaattgttactatcaccctcacaagtgtatgagttagcactataaaccttcattctgctgatgctcagagaaattacataagtcatacatctaataagagatttgaactcagctactaaacttgagcttttaataactattaagaggaggatctgaaagtagccctctatatttgatctgcctttctgtgccaagtttaacaaatagcagctacactgatgagacaggactaaaggaagccatgccagaacctccaagttaatggtggaatcaactatattaagcattcttcttttttcctcactccaatgacaccttaatttatctgacctcatctgcatcactatctaatttaggatatgtaaaaggcatacaaaatttagagcacataaaagggcctctacgttggaaaagtatacactaataacgactttttggtatagttcctgcgcaagggaaatccttgtaccatatgggtcaccaaatcatagctcgtaagtcaaatcgagtccaccacctgtttatgtctctcaagcttagaatattttacatttttaaatggctggaaaaagtttgaaaaataataatagtttgtaacgtgaaaattataagaaattcaagttccagtatccatcaagtgtactggaacatacccaagttcattgatttataaatatactatatatgataatgctttggctctgtgtccccacccaaatctcatcttgaattgtactcccataattctcatgtgttgtaggagtgaccccctgggagataatctgaatcatgggggcagtttcccacatgctgttcttgtggtagtaagtctcacgagatctgatggttttatcaggggtttccgcttttgcatccttctcattttctcttgtcactgccatgcaagaagtgtctttcacctttcgccatgattctgaagccttcccagccatgtggaagtgtaagtccaattaaacttcttttttttttcccagtctcaggtacgtctttatcagcagcgtgaaaaaggactaatacaatatactatatagtttatggctgtttttcatactacaatggcagagttgagtactttaggcctgcaaaacctaaaacaaataccacctgccctttacagaaaatgtttgccaacccttagtttaggatctattatttatctctgccctccagtgaccctgccatctaatcatttggcctcttaactctctctttaccctgagcaaatccgtaaaataaaaggtatacctttccccaagtactattaaagaaaagaagaggagaggggaaaagggaaaaaggggaaaagaaagtgaggaaagggagaggatgcaaaagaaaaagaaggaaagaaaggaatttccctgatgagatcccttagtaataccttatcagctgttcataatcaaaattcctagaagaggaacaacagcttacttgctataatttcttcacattccattgacttttcttattactcaaaaaacaaagtatgttataatgtgttgatttttaaaataaaacaaacttttcttatttagtcagcaatgaaggtcaagtgagaccttctagtaaaagtcctctaaagtcagacacatgaaaatacttatccatttaaaacagacaatactttccaattatttatttctatgattgaattaatgggacagtgctacaaacagaagtcctatggaataagtcatacttggaagatcagagtttactctagacaacttgacagcaatcagtttaaaaatggtttcacctagagggatgtgtactaatgttagcaattaactttgaaaggcataaaaattaagatggattgatggatacaaggatggttatacgataaagcaatgtaagtattaatggcagaatctaggtggcaggcatatgtgtgtcagctgtaaaatttgtgttcaatgtttttttagttcccacatatcagtgagaacatgtgatatctgtctttccgtgtctggcttagttcactaaaaaaatgaatttacaagacaactggaatataagcaatgaatacaagcactaagaagatgaagccatagaaacagctgccagaaagtgaagatgtgacagtgaacgccaaacaagtaagattagaattacaattagaatcagaaatgacaaaaaagaaacatgaactgtgagatgcaatataaaaactaatggtgaacaaagcaaagaataaaaaataaaaacggaaagattaaaaggaaaatgtgactgtaagtagagtgacctttatattatacagaaggtaaagcagaatgaacatgtgaggaatctaaaaaacagatataaaatagaaacaactgaaggcttatataattagtctataaagctaggaaccactgcttagtaatttctcgtaagtggagtctctttgttctgagacgttgcaaaactccattccatctcaaagttatttttaatgttaaaatttgtaagagtgagcaacggtatcctaaatagttctaggccttgtagaaatagactgtaagagacatctgtgacacaactatattcagtatgatgtagggtctgttacaatgggatgaagtgaatttagattatttcaagactaaacctacaattgtgaactcattagtaccatgaaccgaacaaaaacctattaaatatagaacaagacgattttcatgaaaaaataaatatgaacaaatcagtattttcagttgtttgaaatataggttaaccttcaattactgttttatggccgggtgcagtggctcacgccacgcctctaatcccagcactttgggaggccgaggcaggcggatcatgaggtcaggagatcgagaccatcctggctaacatggtgaaactacgtccctactaaaaatacaaaaaaaaattagctgggcgccgtggtgggcgcctatagtcccagctacttgggaggctgatgcagaagaatggcatgaacccgggaggcggagcttgcagtgagccgagacagagccactgcactgtggcctgggcaaaagagcgagactctgtctcaaaaaaaaaaaagaaaagaaaagaactgtttttttcatttttatagtctcaatatccagaatgcgtgatatatgataaaaaaaaaagtaaaattgtagaactaaatatttacataattcatctgtaaaatgaaaatctgttttacagtgtcatatttcacagttagaaaggaagaaaaaccttaaatcaacaaattaactttacatcttatggaattaggaaatgaagaacaaatgagactcaaacttaccaaaaaataaaaaaaataaaaataaattacagctaaaataaaatagagaaaaatagaaaatttttgcaatagaaaaaaaatcaacaaaattaggagtagctgttttattgaaaagatcaacaaaactggcaaattcttagattaagaaatgaagagaatagacacaaacagcaacaactggaaattagaaaggcgatacaacaactgctgccacagaaataaataggaccttaaaagactaatatgaacaactatgacccaaaaaaatttgataacctttgagaacggatagacacatcaaacccaccaagactgagccacaaatacatacaacttctgaatggacctataactattagagattgaatcagtaactgtccaacaacgccagggcttcactgaaaactctaccaaacatttaaaaactaacaacccttctcaaactctttgaaaaaactagaggacagaacactttcaaaatcattttatgaggtaagcattacttagatatcgaaatcagacaaatttacaagaaaaaagaatccctaataaatactgatgcaaaaaaaatcaacaaaataccaagaaacagaattcaacaatgcattaaaaagattatatttcataaattctcaactggaatttattcataaaatccaaggatggttcaacatacaaaaaaatcactttaatacactgcattcttaggacaaaaaccaataatctcaactgactcagaagaagcatttgacaaaaatcaacacccttttaggatttaaaaaaaggccagacagggtggctcatgcctgtaatcccagcactttagaagggcaaggtgggtggatcacctgaggtcaggagtgtgagaccagcctggccaacacagtgaaaccctgtctctactaaaaatacaaaaactaatcgggcatggtggtgggcgcctgtaattccagctactcgggaggctgaggcaggacaatcacttgagaacccgggaggcggagctggcagtgaggtgagatagcatcattgcactccagcctgggtgacaagagcaagattctgtctcaaaaaaacaaaaacaaaaacgctcaattcgctagaaagatatggaaattacttcaacataatgaaggccatatatagaaagaccacagctaatgttattcaatgatgaaaaactgaaagttttccctctaagatcacaaatggaacaagaatgcacacattcaccacttctattcaacatactgttagacatcctgccagagttagcaactgggcaagaaaaagaaatgaaaggtattaaatgagaaaagtaagaagtaaaattacttctgttagcaaatgacatgatcttttatgttgaaaactctagcctaccaaaaagaaaaaaaaccgttagaataaaggaattcagtaaagttacaggatataaaaaccaatattaagaaaagagttgcatttctaaatactaaaaatgaagaatccaaaaaggaaattaattttttaaacccatttaaaatgaaatcaaagagtaaaaaatacttagggaatattttcaccaagcaaatgaaagacatgtacattgaaaattaaacaacataggccggacgtggtggctcacgcctgtaaccccagcagtttgggaggccaaggtgggctgatcacgaggtcaagagattgagaccatcctggccaacatggtgaaaccctgtctctactaaaaatacaaaataaattagctgggcttggtggcgcgcgcctgtaatcccagccactcgggaggctgaggcaggagttgtcacttgaatttgggaggcagaggtgcagtgagccaagatcacgccactctactccagcctggtgacagagtgagactctgtctcaaaaaaaaaaaaaaaagaaaaagaaaattatacaacaatgctgaaagaaattaaagacaatacaaataaatggaaagacatccaagtttatgaattggaagatttagtactgttaagatggcaatactacccaaagcaatctgcaaattcaaagcaatccctatcaaaatcccaatggcattttctacagaaacagaaaaaaaaaatcttaaaattaatacagaatcttgaaggaccctgaatagccgtaacaatctggacaaaaaacaaagctagaggcctcacattccctgatttctaaagatattgcaaagctatagtaatcaaaacactatggtgctggcataaagacagatatacagaccaagtgagcagaagagagaacacagaaatagggaaaagaggttcttcaacaaactgtattgggaaatctggaatctaacatgcaaaagaatgaagttggagccttatctcacaccatatacaaagatgaactcaagctggattacagacctaaacttaaaacatcgaattataaaactactacaagaaaacatggagaaaaagcttcatgacattggacttggcaatgatttcttgaatagatcaccaaaagcacaagcaaccaaagcaaaaatagacaaactggggatacataaactcaaaaatttctacaaagcaaacagtaaatggagtaaaatggcaacctacaaaacaggagaaaatatttctataccatgtatctgttatttggttaatatccagaatatataaataactcctacaattcaacaacaaaaaatctagttaaaaagtggacaaaggacttgaatagtcatttttccaaagaatatatacaaatgggcaataagcccatgaaaagattctcaccatcactgatcagtagggagaaatgtcaattaaaactgcaatgatacatcatctgaaaccattaggatggccaccattaaaaaaacagaaaataagtattggtgaagatatggagaaactggaacccttatgcaccactggtgaaaatgtaaaatggtgccaggcactgtggaaaacaacatgaaggtccctcaaaaaatttgaaatagaattacctccagttccacatatgaagagcttggaagtcaccactccatcctaacaacaagtaaaaaatgacaaacttaaaaataaacaaatctgagataggataagtgaggtcacagggcaaatgactgcctgtgagagcagagaacaggtgaacacatagcatcaccatttatctgagatgaaaaacacaagcagaaacctccacggggtaggaaatcctgaagtgtaatagacaaattgatgaaggctcagtgtggacaactctgaaagctaaaaactccagagttacccaattatagggggagccctacaattttctaagttttacatccaggcaattgaccagcttctcacagtaaatataggagaaaaatcctcaaccctcagcaggggaggcaaagagaaatgattttcaagtacactagactattccagtcttaacaaggtttgtcctcaggagaaactagttaaccagagcctaacctgctggggttgtagcaaagccaaaatgatgtgggggaagagaaataacccaacttcaggccattatagctatcttgttctaactaagggaatgagggaggggtgggattgagaaacacttgtgaagttcacagtccagaggcataagctcactaaaaagactgacctaatcataagactacagaactcttctcctctccctacaccttacaaccacattactaaatgctcatttacaacagttccttttacctagtacatcatgtccaagctatcaagaaaaaaattacagggcataataaaaggtaaaaaacaagcaccaggaccagatacagcagggatttggaattatcaaacttggaatctaaaacaactatgattaatatgctaagggccctaacgaactgagtaaacaacatgttaaaaaagtagagatgaaaatcctaagaaccaaaaggaagtgctagagataaaacacaaacaaaaacaaaaaacagaacactgtaagagaaatgaagaatgcctttgatgggcttattagtaggctgggcatggatgaagaatctctgagcttgaaaatatgccaaaaaactacatctgggcataaaacgttgtaattacagaaattcaaggataagaaaaaaatccgaagtaagccagagggaaaaaatcaccttacctgtagaggaaaaaaagaaaaaaaagaaaaaatacatgtgacttccaacaagaaaaagagtgaaatattcatagtgttgagagaaaaaaaaaccataaacctagcactctaccttgtgagattattattcaaaagttaaaaagaaacactttctcagacaaaaattaaggaaatttgttgtcagtacacctgccttgcaataagtgttgggaagttcagaaactgaaatctacatatatagagcatcaaaagaaggaaacactgaaagtaaaataaaaccttttatttttcttatacttaattgatctaacaaataagaatttgttcaaaataatgtcaacaattgtgcttatgcatacaaatgctcctaaacttacttattgggttgtgtcccaataccattataaattgaaaatatcatgaaaacacaacttatccaaatttgtgggatacagtgaaagcagcgcttagaaagaaacatacaacactgatgcatttattagaaaagaattatctaggccgggcgctgtggctcacgcctgtaatcccagcactttgggaggctgaggcgggtggatcacatggtcaggagatcaagaccatcctggctaacacagtgaaaccccgtctctactaaaaatacaaaaaaattagccacacgtggtggcaggcgcctgtagtcccagctacttgggaggctgaggcaagagaatggcgtgaacccgggaggcggagcttgcggtgagccgagatcgagccactgcactccagcctgggcgacaaagcgagactccatctcaaaaaaaaaagaaaagaaaagaatgatctaaaaatcaattatctgagctaccaacttatgaaactagaaaaagcaaattaaatccaaatagaagtaataaaaattagagcagaaatcaatgaaattgaaaacaagatatcaatagagaaaaatcaaagaaatcaactagttctctgaaaagatcaataaaatcaataagcctctagccaggctaagaaaaagagacaaaggacaaaataactaatatcagaatgaaaagagtggacatcattacagatctcatggacattaaaaggataatcaagggatattatgaacaactttacggccacgaatttggtaacctagatgaaatgaatcaattccttaaaagacacaatctattagaactctaagaagaaataatcttgattaaaaagcatatattaaagaaattaaatccataattaataatgttctaaaagagaaggcatcaggcccagatggattctctgatgaattctactaaacatttaaggaagaaaccacaccagttctctacaatctccttcagaagacagaagcaaaggagatgctcctatctcattgtatgaagtcagcattactctaatacccaaaccagacaaagacattatcagaaaagaaaactacagacccatatttgtcatgaacaaagatgcaaaaatctttgtattagcaaagtattagcaaactaaattttactacaatgtataaaaagaagtatacaccagcacaaagtaggatttatcccaggtatgcaagactggttcaatattggaaaatcaattaatgcaattcaccatatcaacagactaaagaagaaaaatcacatgaccataccatagatggagagaagtatgtgacaaaatttaacacccactcatgatagaaactagtaaactaggaatagagggaacaccttcaacttgataaagaacgtttacaaaaaacatacagctaacaccatccttaatgatgagaaactagaaactttcttactaagatcaggaacaagaaaagaatatccccacctcaccactccatactggaagtcctagctaagacaagaaaaggaaataaagggtatactaacggggaacaaaaaaatacaactgcctttgtttgcagatgaaatgactatatgtgtagaacatagacaggaattgaaaaaaagaaaaagaaaaacaacaaaaacctcctagaactaataagtgattatagcaaagctgcaggatacaaggttcatataaaaaagttaatagctttcctgtaaaccagcaatgcataagttgaatttgaaattaaaaacacaataccattttacattagcgtgtcccaaaatgaaatatttaagtacagatctaacaaaattagtacaagatatatgaggaaaaatgttttagaactctgatgaaagaaatcaaataactaaataatgaagagctattccatgacccgtgagagacaactcaatattgacagaaaaagtcagatggacactactgatttcaagatttactgtaaagctacagtagtcaagatggtgtggtactgacaaaagaactgacaaaacagaccaacgaaacagaatagagagcccagaaatggacccacatagtcaaaggagcaatggcagtatttgacaaagaggcaaaggcaatacaatgaagaaaatagtctttttcaataaacagtggtaataactgaacatccacatgcaaaaaaaaaaagagtctagacacaggtcttacacccttcacaaaaataaactcaaaataaaccagagaattaaatgtaaaactcaaaactataaaactcctagaggataacataagaaaaaatctagatcttgggtttggtgatgacttttagatacggcaccaaaggtaccaaccatgaagaaaagaactgataagccagacttcattaaaattgtctacttgtttcttaaaaattgttgtcttttgcaaaagacaatgtcaagagtatgaaaagacaagccacagatagggaggaaatatttacataagacacatctgataaagaactattaactaaaatgtgtaaggaggctgggtgtggtggctcacatcccagcactttgggaggccaaggtgggtggatcacctgaggtcaggaggtcgagaccagcctggctaacatagtgaaaccccgtgtctactaaaaatacaaaaattagccaggtgtggtggtgcacgggtataatcccagctactcgggaggctgacgcaggagaatcacttgaacccaggtggcagaggttgcagggagccaagactgtgccactgtactgcaacctgggtgacagagcgaggctctgtctcaacagacagacagacagacagacaagacagacagagacagtgtaaggaactcttaaaattccacaagaaaacaaacaacccaattaaaaaattggccaacaaccttaacagacacctcaccaaagatatacagatggcaattcagcatatgaaaagatgtcccacacatcatatggcatcagagaaacacaaattaaaattataagatacctctacacacctatcagaatggacaaaattcagaacactgataacaccaaatactggtgaagatgtagagcaaaagaaacactcactcattgctggtgaaaaatgtaaaaggatagcgtcatattagaagacagtttggatgtttcctacaaaactaaacacttttaccataagatccagcaattgcactccctagtatttacagaaagtcgctgaaaacctaagtccacacaaaaacctgcacaccgatatctacagcagttttattcataattagcaaaatgtggaagcaaccacaatgtccttcattaggtgaatattcattcacaaactgtgatatgtccagaaaatggaaaaagagaggtactaacaacctatgaaaagacatggaagaaactttaatgcatattagtaagtaaaaatagtcaagctgaaagggctatatactgtatgattacaagtatataatatgctggaaaaggcaaagttagagacacagtaaaaggatcggtgattgccaaggagtgggagggaaggaaagataaataggcagaacacagaggattttggggcagtgaaaacattctgtatgatataatggtagatacatgtcattgtactttgttcaaagccacagaacgtacagcactaagaatgatccctaatataaactacggactttgggtaattatgatgtatcaatataggttcatcagaaagacatgtaccactctggtgggagatgcacactggctatgagagaatccatacatgtgtgtggaaggaggtacaggggaaatctctgtaccttcctctcaattctgtgaacctagaactcctgtaaaaaaaaaaaaaatctaaaaaaaaatagaatacatatgatccagtaatcctacacctgggtatacttccaaatatattaaaaacaggttctcaaaaaaatatttgtatacccatgtttatttcaacattacaatattcaagaagtggaaggaacctaaacatccatcaacaaatggttaaagaaaatgtggtatacatatataacaaaatgttattcagcctaaaagaaaagaaagaaattctgtaatatgctacaacacaaatgaaccttgaggacattgctatgtgaaataggccagtcaacaaaagacaaatacttaatgattccactgacatgaagtagccaaaacagtcaaattttagaggcaaaaagtagaatggcatttgccaaggaataggaagaagggggaaaagaagagttgttcaatgaatgtagagtttctgttttacaagatgaaaaagttctagagatctgctgcacaacaatgtgcacagttaccacaattgtaccgtacacttcaaatcattaatatggtaaaatgtgttgtttttgacaatttttaaaactctaccccattgttttctttacctcttatataaactgataaaaacctgttttatcttaatcaattattgtatgactactgctccccagagaaaaaagtgcatgtgaaatactactacttatccatctcctggctctgagcagtacatgtcaggaacaagagggaattgtagctggaagacagtagaagagccataggacaagtctctaagagaaggaagaaaaggcgcaatgaaagaaaacaagtttaagatagtagaaaagcattcaaagacggcaacctgaggtaaggtgttttcactgaagcttttggggtaaaacagttttgagttggcatgcctgtagacatgggaagcagcagtgatgcagaggtgaacattactgtagataaaaacggatgggaatttgacttgctagggactgaggggttaatcatataaataaagatggcagcagatttgggaaagagtgaagaagaataagttcaggtagcagtcctcaaaaaccgagaagaaactgatagctcactgaaggcagacagaggaagacaaaaccagaaggcataagcttcaaaggagcagggatttttatgctgagagagtaaaaggaatagttcaaagcagcagtggagaacacgaataacgttccatgtgggaaaagaacatgtccagagcttactgtacctataacctagcttctgtaactggaaatgaagaatctgctctagtcaggtcatcacttttcactacttattttacttggccttcctaagaaatatagaccttttggaaattattgacttttgggtctaggacactatttcttggtttcctcccttctctctggctgtttttcagagacttcccttccaaatctagagacatttgtattctccagggatcagctattagatactttcccttttaaatttccctttggacagtttcatctttcaaggattgagcaataactaaatgacttccaaatgtctacttcagtataaattctgcttgtcaggctacataaaaagggctcttcaaggaattatgatgtctaaagaaagagaaagccacgatttcaatatcacagagatgactacagaggaatagcaataaaaagagaggcaacttaggagaggtgaatcacaaaagatgactaggagctgatgacactatgggtgggaagaatgtttcagacaggggaagaatgtttcagatagaggaaaatgagtaaaagcacaggggcctgaaaacatgatattataagacaattccaagcacttcaagagcctaaagttcaagaaaagtttcaaaaatatgaaaatggagaggcagggaaaagccagatcatggaagacctcaatagccatgataagtaattctttttttagccaaaagaggagtaatctaataaaagctaaagatcttctcctcataaaaatacatgcacacttcaggagtgcaaatgcactcttccggaagattcgtaacccactacattcataaaccattagataagaactaaaacacaaggagtcactgaagggttttaagcaggttaagtgactgacaaaatttgccttttcaataactgaaaccaaagtgggcaaaactggaggcaagcaatccagttaggtaatgactactgtaatagtccggacaaataatgtagcagtaggaagaaaaaaaaagatgaaattgacccaggaaatatttaaaataagtagtttgtaagaggtaaataagctggaagagccagaggtaatgggtagggtttctggtatgggcaacaagatatgctacaagctgagatgttagtaaaaacaagcgttcatcagcatttagtaagtgatttatttatattatatcactgaatactcaattatgttaagaggcagacagcagttaaaaaacaaagaactcggtgaatcaaaaagttctgctaatttggggaaatagcatcccttttatttttgttaatctcttttgggtttgatcctcatttatagctgacaagaagttctatgtactaaaggtaaactattctcattaatgttcccaaaaatctcttggaataattaagatataaagaaattcaaaattcacatgattataaaaatctttccttagataatctcataatatagccatgttttgctcattctactttgagaagattcagccagaaacagttcatccattcaactatccctactgtgaactagaagtatgtttccttacatttgaaacagaagatataggtttatatgatgcttcaggtggtagaaaagcagggcagactatgactcgtgtcacttccttccacacgtgatgcctttcatgggctcctgtgtctgtcagaagaaagcaaagggccttagcgtgctcctggctttctatatccaaatgcattttttcacaccttctcccatcagctaactctacattactgcaatacggaacttcttactactcagtggacttgttctgctgtcttctctgattccaggtgttattcttcctgcctagaacactatgattcttagctattcccaagcatcctcaaggtttcagcttatataccacttttaagataattaggtattcttcctctgtagtctcataccaaccagtacctattctattatatataataactgcctattaattaaatgggaagctgaggtatatgacctaataacttatttactgtcgtatcctcagaacctagcaaattacagagtctcaacagagatttttcaatttctcttctgatactgtctcgataacagtgtcaattaaacctttctctaattatttgaccttgaagggaaatagatgtcagactacctcctggtttcgagtatactggaagcatacaaaaggaccttctcaatctggagaccaagaatatgatatgagaacctataggagaaccacttatttgattaaagagatttcttttacttcagaaaatatttcagtatgttacttgacccataaatgcttatagatgtgtaagtacaccgaagaagtcatataggaaataaaagcatccaagctatatttctatggtctactctgattaaaaagctcagctctcctatcaaattcaagataatgcatgtggattatggagcacagtcacttgctacatggtaaatgctcaaaaagatgataggtggtattacccacattctacaggctgtgtacatacttatcagtttatatatatacataaactgatcctaaaaaattcttcctacatttctgcaagataattaaaaaggcagaaacaaacattttgcataaatttactagcttcattctttcatgtaggaagtagttactgactacctactgtatgccaggcactgtcattaggcttccattctagtggtaaagaagcaaaacaacaaagaaatcaatatgcaagaagtcaaatgacattaaatcccatgaagaaaaatgcagcaagttaaggggaatgcagaagaacatgatcattctttgatgcagccggtcaggaaaagcatcatttgagcagagagctctctgaatcaagtgaggaaggaagccacatggattatcacagagaagggtcacagggtcacagacaatagttacaagccttaagatgacaaagatacagccattttagacagagatgagcaagtgcggtagagagatcacagaaatgaaaggaagccagttcacacagggccatgtaaatctccagattttacttttaagatgggaagcctctgaaaagttctgtgcatagtaaataacatggtttaactcagattttaaaaagatcattccggctgctactagagaatacactgtaaagcacaagactcctgggaaacaatttctttcttttgccaaaagatgatgcctttaaacagagtaaacagaagtataatggttaaaaaaaataaaatgaattatgggtatttggaaggtgtagccaacaagatttaccaataatttgagtatgtgacatagagaaattaaaagatgcttccaaggcttctggctgcacaggaggggaaaaaagctgttattgactgagatggcaaaatattatgagagacgtaggtttgggatgatgaaaatcaggagctccacttaggacaggttaagtttgagaaccagacttaactgttggataaatcagtctacagttcagagggcaagagctgacgatggaaatagaagagttgtcaatagacagagtcctggggcatttctgacatttacagtaaactgagcatttattaaaactaacttgctttactgaaccataaatcacttgttgtatttacccctgctccatttatagttatacatctggaaacatagccttagtgttagaggtaaagagtaaataccaaacataaaaaatctgatctggttgggtgcggtggctcaagcctgtaatcccagcgctctggaaggccgaggcaggcagatcacgaggtcaggagttcaagaccagcctggccaatatggtgaaactctgtctctactaaaaatacaaaattagccaggcatggtggcacatgcctgtaatctcagctactcgggtggctgaggcaggagaattgcttcatcctgggaggcaggggttgcagtgagccaaattgcgccactgcactccagcctgggtgacagagcaagattccatctcaaaaaaaaaatctgaagttactgagaaactggtatgaaatcattaagaaaactaaggtgtctaaattaatacatacaaagagattctacaacacggtatttataaatttaaacaaaatccatggccaggcacggtggctcacgtctgtagtcccagcactttgtgaggccaaggcagaaggattactttggggccaagagttcaagaccagcctgggcaacatagtgagaccctgtctctacaaaaaacaaacaaacaaacaaaaacactgttttagcctggcatggtggcacatgcctgtagtcccagctactcaggaggctgaggcatgaggatcacttgagcccaggaattcaaagttgtagtgagctctgatcacaccactgcactctagctgtatcacttatgacagagcaagacaatatctcaaacaacaagcaaacaaaacaaaaaactaaagtaaatccaggtaaaataaacatacgaataaatgaaaagatctgggttattgcattagttctgtttctaggcttaactacaaaatggtgtccagttgttaaaaacacttgtttaagagtattaataatttttttttttactatgctcttctacatcctaggaaattggcaacactaagaattcctaaaaacaaacaggagtgttaactgtatataaattattatttaagatgcattcaaggcgttacttaaaatatcaaatgcatgtcaaagtacaaacaacaaaatcatgcttcaacaaatgtgggatgttgccattaatggacagttagctctgaggtaaaaccaagaatccttcattacctatttttgtaaattaggacaaatactattaaggtattaggttggtacaaaagtaattgaacaaacctggacccactcacctcactgaaagtgctgcctggctacagtttctagatataggaatgtgagaaatggtagcagccttgaaggtttagagctatattcccataccaattatggctagaaacttaaaacagctctattgagacattatgggaagtctaatttcctgttactctactttaacacagccaagtaaaacagtaagaaagcttgcttaattcaacaaggactgagtgccagagtgtcacctggaaacttgtgacaaataatcatgcctcacacattcatccttggtttttactaccaaatgcaagcttcatctatcctcttccattctaaacttgactcatcctcctaacctcttccagaaagatctctagaaacccagaggctttctgaagacccataggctatcccccatcttcaactactttacataatggcccctcaacttcttagctttcatgaaagcctggctcctccccaaaggcactgcctatcatgcaacccttttatgtgactcctaaaactcctaagtccaccattattcttctaattccctgtattaaaaataaacggcaaaattccctgtattaaaaacaacaaaaaaacagcttgtaatttgaaactcatgtcatctaaccgaatgccttctctttccctccctgttctggtcaattaaacccacatatttaagcctccactttgcccccagttacatcatcagcaaagtgacttcaatgtccctgtacatggttctatcccaatactctaggcccccaaaatatttgcctttctaaatttgagacatcttcacctcctcatttcagcaaatcactcccttgtctttgttagacatactaaaacctctgacaatgatcatctcagctatctttgtaagagtttcactcatactcatatctcctttcacctgtcaagacaccaggtttggtgacaaataaaaatgatacgtatttgggaggctgaggcaggagaatcatttgaacccaggaagcagaggatgcagtggccaagatcatgctactacactccagcctgggtgacaaagcaagactctgtctcaaaaaaaaaaaaaaaaaaaaaaaacacaaaaaacaaaaaaaaggatacatatttattgtattcacatgatgttccaaaatatgtatacactgtggaatggctagatcaagctaattaatacatgcaatacctcacatacttatattttatggcagaacatttaaaatctactctcagtgatttccaaaaatacactgttattaactagtttccatgttgtacaatagataccttgaacaaattcctcttaattgaaattttgtgtcctctgaccaacacctctgcaacccagtccactcacccccagcccctggtaaccaccattttacatccctgagttaagattccacatttaagagagatgtagtatttgcctttctgtggctggcttactttcaacaatgccctccaggttcatccctgctgtcacaaatgacagcatttcctcctttttatggctgaagtatattccactgtgtatacataccacattttctttatccatgaacacttaggctgatgctgtatcatgggtattgcaaatgataccgaaaggaacatgggagtacagatctcttcagcgcactgattttattcttttatttatatatatatatatatatatatatatatatatatatatatataaaaatacatatatatccaagtgtgactgctgaatcatatggtagttctattttttaatttctgagcaaacgtcatgctattttccataaatgctgtactaatttacattcctgccatgcgcaatatatctcttgtctgcaaatcctcatcatactttaatagccattctaatggccatttgtatgtcttattttgagaaatgtctattcaagtcctttgcccatttcttaagtgaggtgctttcttactattgagatgtctgagttccttatatattttgcatattaaccccttaccagatatatggtttggaaatactatcttccattctgtgagttttttcattctgtagattttttctttttgccatgcagaagctttttagtttgatgtgatctcattcatcaatttttatttttgttgcctgtgcttcgagggggtcatatccaaaaaaatcactgtccaaaccaatgtcatgtacatttctcctatactttattctggtagttctacagtttcaggtcttatatttaagaccttaatccattttaacttgaatttggtatatgatgtgagatacaggtctgatttcattctcatgcatgtagatattccattttcccaacaccacctattgaacagacttccctttccccgctgtgttctttgcaccctgtccaaaatcaactgatagtacacgaatttatttctgtgctctccattctgttttgtgggtcgatgtgtctgtttttttgtttcttttgtttttaaaagacagggtctcacgctgtcatccaggctggagtgcagtgatgcaatcacagttcactgccaccttaagctcctgagctcaagcaatcctccttcttcagcctctcgggtagctaggactacagatacacagcaccgcgcctggctttaaaaattttttttttttttaattttagagacagggtctcactatgttgcccaggctgctctcgaactcctggtttcaagtaatccttctgcctcagtctcccagagtgtgggaatacacgtgtgagcaactgtgcctggcctgtctacttctatgtgactatcatgctgttataattactgtagctttgaactatattttgaaatcagatagtgtgatgtctccagctttgttcttttcactcatgacagctttggctatttaggatcttatgtggttccatataaattttagcactgttttctagttctgtgaaatttaacattggaattttgatcaggattgcattaaaactgcagattgctttggataataaaaacattttacaatattaattcttccaatccataaacacaagataactttccattatttgtatcatcttcaatttctttaatcaatgttacatagttttcaactctttggttaaagttatttctaagtacaatcatccctcggtatctgcaggatattggttccaggatctcctgtagataccaaaatccatggatgctcaagtccattatataaaatggtatagtatttgcatacaacctacacacatcctcgtgtatactttaaatcattacttagtacctaatacaacgtaaatgctatgtaaatagttgctatactgtagtttccttattgtataagaaaacagtatttttattgttgtatttttttctcaaatattttcatccaaatgttggttcaatttgcaaatgcagaaccactgatactgggagccactgcatgttttgtttttggtacctattatacatggaattgtcttcttgatttttcttttagataatttgtcattaatgtacagaaattctacggatttttgtatcttgattttatatcttacaactttactgaatttatcagttctaacaattctctggtggagtctttaggtttttctatatacaagatcatgtcatcttcaaacagggacaacaatgtcttcctttcctactgggatgccttttctttctcttgcctaattgctcttgcaaggacttccggtactgtgctgaatagaaatggcaaaagtgggcattctcgttttcttcctgatctcaaaagaaaagcttttaacttttcaacattcagtataacgttagcagtgtgtttgtcaatatggcctttattttatagaggtacattccttctatacttaattttttaaaattttgtagcacaagagaatactgaattctgtcaaatgctttttctcaattatctcaattatctattgaaatgataacatggttttggcctttgttctcctaatgttgtatatcacattttatggattcaggtctgttggataatccttgtacccttgaggtaaatcccatatgatcacagtaaatgatccttctaatacactgttgaatttagttattattttcttcagaatttctgcatctaaattaagaatacgggtctgtaattttcttttcctggagagttcttgtctggctttggtatctaggtaatgctcatctcccaaaatgagtttgaaattactccctcttcttaaatttctcataaaattatgagaacaatctgtactagttcttctttaaatgtctgctagaattcagcagtaaagtcaccaagtcttgggcttcctttggtgggagatatttttatgactgatacaatccttgtcactggactgttcacatttttcatttcatgattaagcttggacaagttgcatgtgtctaggaatttatccatttcttctatggtaatcaatttgttggcatataattgttcagtctcttatgatcctcttatttcttgtacttctctggtatcagctgcaatggttcctctttcatttctgatttaacttgagtcatctctttttttcttagtctagctaaagacttgttgcttttatcatcaaaaaacacaactctttattttttttatcttgagtcatctcttttttccttagtctagccaaataacctgtcttttgagttcagattcttttgtctgcttgctcaattctgcttttaatgctcttttgcatttttcattccatttattgcattttcagcttcagaatttgttaaaaaataatttcaatctcaaaatttctcattttgattgctgttttcctgattttgttgaattgtttatctgcattttcttgaaattcattgagcttccttaaacaattactttgaattctttgtcaggcagttcatatatctccatttctttatggttggttcaggtgccttattgtgttcctttgactggtgtcacgtttccctgactgttcttgatccctgtagtcatgtgttggcacctgcacatttgaagaagctgagacttgttccagtctttgcagagtgactttattgggtaaagcccttcaccagtcagcctgtccagagattatgcagcctgagtctaccggggctggcctggagtctgggtcagcagggtaggtcctggagccttggtacacaggtgctgctggcctggcatcctggtctactagagtgagcctgaaccttggatctgcaaggaccagtgtgaaggctgggtaggtggatgttggcctagaatttggatcacaaggggctggccaagtactgggtttggacccttgttctgcagtgatgtgaggccacaggggccgatctagagggcagggctgcagggaccaccctagcactagacaggcttagagcctagggctgtgggatccagcttggtgctggggtgggcctccaagcttggtttgtgggtattggcctgaagtttggggccatgggggcctgcctagcattgagttttactggggcgagctcaatgttagggtctaagtctggtgtacacttcccctccttcccccaggtgaacagtctctctctccatgctgggatctcagggactgagggaggtgtgacacaagtaatgtaaaactgtccttcttacccttttcaatgtgtcttttcttatctgtgtgccacattcaggtaatctctcgtctggtttcttagctcttatatttttgtgtgtagacagttgttcaaattgatggttctacaatgagatgagtgctgcaaagtgctagtctgccatcttgctgttatctagacctcaggcttttcttaaaacaactcaacactttggtctggcatcccaacctttccaatcatggccatcatccacagcatataaattcaaatactccaatgttaacatcttatgcacatgccactaatgattctgttccatcagctctgctaatatccaaccctaaaataccatgcataatcttctggctattggagaaaagtctttaaatttcaaatgtgataaagtctttaatcttaactagtcactcagtggaatgagattctcctactctgatacggtttctgatttcaggtagccagccagtcaagactctcaacttctgatccacttcttcacccattcccctcagtagcttcctaagttttcagtcttctcaaaacctctaaacaaaccttgtattccacaaaatattattaaaaaatgtttcataaaaagtttcgtggtcactaacctacagtaacatactaccttatatccactacaatgactactattgaagtacacacacacacacactctcacacaatatgtgatggcaaggatgtagagaaactggaccccttgtgcactagtggtagaaacgcaaataggtacagttgctctggaagagtatggcagtttctcaaaattttaaaaataaaattaccatatgatccaacaattccacttctgggaaaacaattcaaagcagggtctcaaaaagatatttgtacactcctgttcatagcaacattatctgtaatagctacaacatggaagcaacctgagcgctcatcaacaggtaaatggataagcaaaatgtggtatatacatacaataaaacattattcagcctgaaaaaggatgcaaattttgaaacatgctaaagatggatgaaacttgatgacactgcgaagtaaaataagccaatcataaaagggcaaaaactgtatgattgcacttatagggggtacttagagcagtcaaaattagacacaaagtagaataatggttgtcagaggctgtgaagataaggaaatgaggaattattgtttaatgggtacagagtttcagttctgcaaaacagagagttctgatcgtgactgtgcaacaatattaatatacttaataccattgagccaaatacttaaaaatggtgaaatggaaaattttacattatgtgtattttactacaattttttaaagcttaaaagacaagtcacatggttgggtcacataaatttgagaaatacattttatagtcgtttcttgcagattcacaatatataccggcatttaaataaggttccaatattttcagtaaaaaaatcttgatttttccaccctcacccacaattacaattaatatcacacatccatctttacttccttgttctaatttcattagatgggcatctttcctcttattcaaggtcaatcactatatctgcatttttctttttttatattacctgtatgagagatacacctgtatttttcattccaacccttaatacctcgaaaaactttgctttgataattactacctctattatctgaaacatctttagtcttcacaataaatcactaaagtcttacttacttcatgtcctaaatatttgtcttaaatccagaaaaatttattttgaattcctattataccactgtcattgtcaaggctctcactgactgaactaccttaccaccacacgtttctcttcaatcctttctctcttgcaaggttattaaaaatacacgtttgacaaacttactatctacctactgagcaaattctttgctgactccctaataccttctatcacatcttatcttcttcattttcctacctctcagctagtttatgatctaaaagtcctcaactgcctattgtcccctactccctatgctgcttctaactttggctcatacttctgcctggaataagccgctcatgcttctagctgcctgattcccagtcacatttcaagactgaacttagcatttcctggccactcttacttccctgccatctacactagattcctattgcatacctgggtactccagtactccttcatgttactattgtattttggataccattctacctcagtgactgaaattatttgcttctgcatctttcactcttgagtataatataaatttctgtagggtgaaaactaattattacgcatctctgtatctataacatagtacttgatgccttaaatatggtaggcgttgagactgttaaactcaactctttcctcaacctccctatttccctacaactgctaccagggaagcaaaaagactaagaatttaggcgtgtgcatttatctatctagtagtagaaacctagtaaactgttaccgaggtttagagttatctgataggaaaaaaagtaggtatgttcctatctcccatttactgctaaatgattcctttcttttaaccagaaattatttccaaataatgtgacgtaatttaaagcagtctagggcaactcaaaataagaaccacagtctcaaccaagttacacttacattcggctagcttcaatgtcgtcagactgaggttctcctgatctgtaaaatgcaattgagaaacagttagcaaaatattccatattccaaaaaaaaaggtagacatattacttaggaagacaattttgtaaacaagatttaagcactaaataaaacagttttaaaattaaagatgtcaacatgaaagaaagtggtcagatcaggtggccatacaacacatttattttaagggttggactattaaaaaactcaatgcatgttttttaaaggaaactgtaaacgctatacatagataccaacagacaagccattataagccataattattcacaaagtcaaatacgtgtaataaaacacacaactaaaaaacttcctatagccaagtattggttatccacattaacaaaggtactcactggtattcactcacagtattaaactttagattagtggctcagtaaactactccctaggcagacagactaaagcttaggccagccatgtagttttgtaaatgaagttttattgggatgcagccatactcattcatttaggtatcatctatggctgctttcacactaaaagaacagagctgaggacttgtggcagaaaccacatggcccataaagcctaaaatatttattttctggccctttaagaacaaatgtgccaaccgctaccgctactccagacaattcaaactaaaatctaataccttggtaagtttaaagacacttaaatcagatacaacattctaatgatgattatcttggttcaacaatgaaactgtttccctaaaaatacacttactgtatgtattacctgtcaaaagtgtatcacctgaggtgaagttttgcactggatagctgtgaattaacttcagttttaaacagttgccagttactttgttatttctaaatatactactgctctctcatgtagaaatatttaaaattctaagtcactaaaaagcctttcattttcatttcacgagatatgaatcagtatttccctatctattcacttttataaacagcatcagcaacaatgaatgagtcaatataatattgatttctaacacttagaaattcccaaactagataaaaaatgttttttgaggtcaaaagctaaattttcaaattggcattacaaagtcctgatttgtgaacttctcactgactttaggcttccaactttaagcaactctaacaagaatcttaaaatcagtcacacacacacacacacacacacacacgcacacacacaaacctgttttctaaatttcttagctaaaaacaaaaacaaaaacaaaaaacaacccctcacttctttatcagactctcaaaattaccctcactgcaattcattcagattccaaggacaagaatggaaaaggaaaaaaaaaaaaaaaaaagactccagcagctcaaatatttattttagatcttctttgcaatgtatttaaattttcaattttgcacaaaattacataacaactaaaaactggggcatgctggaggtggcagtgacttggctgtgacacaaatgcaaaaatttcactccaccctctcccccagggagcaagcaaatcacctatgtgacacacctggtctccaccagccttgtgggtaagtaccccaagattgcttccaaacttgtatctcccagacagaagagctaaaaattgatgataaccccatgtaccagctgactcatttttgaaagtgcgaccctccagcatcagatgtcatactgtaaggaggcagagctggcttgcaaaacaaaaaataaacctgctggcactgagggaagagaggcagattagaagttttcaaacacgtaggcagcaaaactttcaaaattaacagggaaagagaagagagggaaaaaatgaggacatgatgataggaaaataaaaatattactgcaaaaaggtaagacacaagaagaaaaacaaatctaagtcttagaagtacaatatgtaactgttacaaagttttgagatcctgaaatgggatagagtttaaatacattatcaaatgataactacatctatcttcccaatttctgttccctaagcaagagaatatgtgaactttggcatcaaaatgtttgccaccaaactgtaacatattaattactactttttacatatattaaagtaggctattaaaaaccattgataagacaagctaagtaatttaaaccaatccagtatagaagaagaaggattgaaagattattaccttaaaataaatctgtcctgggtctattaaacatagcaaagttgttctactcaaattggaaattgttttttaatcaagagaaaaatgaatatatgcagaactagcagacatttttcttgcagtaatttataatagtttctgtctgaatgaatttctactcatcctaataacagtatatttctagaatattataaataagttaccaaagtcccgaggttagaattcaaactctcaaaactatgacatatgccaggtgtggtagttcatgtctgtaatctcagcactttgggaggtcaagacataaggaccacttgagctcaggagttcaaggtcaacctgggcaacatgatgaaacctcgtctcttagccgggtgtggtggtgggtgcctttagtcccagcaacttgggaggctgaggtgggagggtcacttgagcccagaaggtcaaagttgcagtgaactgtgatcgtgccactgcactccagcctgggcgatggagtgagaccttgtcttggaaacaaacataaactatgaaatatataccacctagcaacagttcccaagcttgactttggctcctaaagagtctacttattcttttactgccaagttgctggaagtaagaatcctgtatgtgcttgtaaatgcagaacatataacctaattcaaaacatataaccaaagggaaatttttgtattaaactattgacttaggttatcctaaagtgtgtcagaataacaagtcagaaattttaaaactgaaacaataaccaaataacattggataataaaatgtaaatctcagaatgagaatcaattttaggtcttgatttgaatcgcagaaaatatgatcacaaaacacccactaatctgaatactgcagcatgagctagcaaattcaaatggtggctcacttccaataacactggtgcagcttctccatcctgcaagccactccttttacctccactgtaactctctaggagagaaaagtatactagttttattaatgttataaaaacttctagagaaatgtttagttaaaacgttcaccacataaaaggcatactttaaaatgcatattaagaaatttttaatgttttctataatgtttatagtaaaatgtttaaaaccttgaagtttttttgagaaatactttcctgtttatacatacagataggtctttgatagtggctactgatatttttaatgagaaaaaaagacactaaaatattttaaggagattaaatgaagtaggtcaactctcaggcccactattcttagcagtattcctgccaactatacattgtcttcatttttacagtatgtatttcactttacaatgacagccttttaaaggctgtaaaataattcaaaattaccttttacaagctgtggccattcggtgacatcagggtgatcacagctttgagtcactgattaaaaacaggttgtcacaccagtctagctgctaccttgatctgagcgtaggcttaataactctaataaattaaacaaacctttggttagaacactttaatatataaacccaattcattgttcaaaaaataatattcaaagcttcaaattaggtgtcaatgtaaaattcatcagaagagtaattattatagaaaagtttttaaggactattttccagcattttgtttttcttaaatgatctcttcatttgagaaaatgtaataattccttgtacttttatgtaatgttatagtttctgaagcattttggtcaatagtaccttgagtcttataacaactttggctttacctaatcaagacagataatatactaagaattaaaaaaaaaaaaaattaagcagcctccgagtgattaactgacttgcccaagattttggaactagtgttgaaggactgactaaaacccagatatactgacttcctatcaagggatggatttttttgtttgttttggcttagttttgctatactgggtttcaagatttaagtatatgtaaatgagtaaagattcagaacacagattgagatctttcaaatacggacaaattcagtcaaaagattcctaagctgatagagcaatcagtcaccaaggagggcaactgcttaatggaatagttatatacatacacataaacacacacacataaacacaaagtctagtcccactaattctgtatgtacgtaaagtcatttaacatcagtcaccgcatgttctcactcacaggtgggaactgaacaatgagaacacatggacacaggaaggggaacatcacactctggggactgttgtggggtggggggaaggggagggatagcattaggaaatatacctaatgctaaatgacgagttaatgggtgcagcacaccagcatggcacatgtatacatatgtaactaacctgcacattgtgcacatgtaccctaaaacttaaagtataataataataaaaaacatcagtcaaaaccccttaagtactgcataaaaatatattctactctttcttggccataaatctactaagatttaatttcatgaaaaagtatggcaaaagatgaaagcatatcctcctccctcaaccaaatatctttttaaccccttacatggccttagctgaacttttctgattgtcacagttcaaatttagcaggcctctttactgacactgtagttctggcaaagataccatacatctgaaatatcccagtatcaaaagatcattttgtgcaactagttctttcccctcacgattcccctatccaggccaaatctgaggcatcaactacggaaagatgaggaaattaggaggaagaaacctttcataattaacatcctcaaagcaacaatagtcaagcgtaaaaggtggttaccagtgtggattcagaacccaatataaaacagcaaggtatctgcgaataccaacggttaaaacatgaatgtttgagcccatacctatgcagctatgaacgcagggcttcaaaatccagattaggtgaggattggcctgaatatataaaaataattgcaggggattccaataaatgggatttatagtatctgtaagaaataacgcaatctcccagatactcctatcctaactatacattgcctaataagaacttagacattgctgaggtcatatgggaaacaccaccttccctaaaataaacaatgtggtcatgatacagcttccccttgggttctcaagagactaatggtatgtggaattagaagattcaaacaagtctaactttccatcttgtaaacacaaaaataataaagttaaaatatcttttaattgactaattgacctcaatgtaattaaagagctatatgtattttgaaaactagagtcaagtcctctcttccagtcccctcttttatgagatccggtgctcaaaaggctccaaggccaggctggacttatgtctctgtttggtcattcactagctgagaaatcttgggcaagttacttaacctctccgagtctcagtttccttataggtagaactaggataatagtacctattccatagagctgtcatggataaacaagctaacatctaagtatctcagaacagtgcctgacataatgtgctcacaaatggctgggcgtggtggctaacgcctgtaatcccagcactttgggaggccaaggcgggtggatcacttgaggccaggagttcgagactagcctggccaacacggtgaaaccccgtctctactaaaaatacaaaacttagccaggtgtggtggcacacgcctgtaatcccagctacctgggaggccaaggcatgagaatcacttgaacctgggagatggacgttgcagtgagtcaagaaggtgccactgcactccagcctgggcaacagagcaagactctgtctcaaaaacaacagcagcagcagcagcagcaacaacaacaacaaatgaaagctattattaatactcatagcccaaaatccaaacctgccctctcaatctttttatgcatattattttacctctcatagcacactaatctcttgtaaattttttcagcaccctacctgggtccctcatacagtcttggaagtgtagttagtgagcacctgacacaatgctttaaaaatggcaggggcccaaatttgctgaacacatctgtcattattatgacattaagatacacatgcaatacgaattccaaaaaataaaacaaaaacataccatatttcgccaaacttctgaggagctggtgaattctaaaatcaggctcttacagatttttaacctaaaatataaaacacctcactcaattctttttacataaacaactggatgaactttcaaaaaaaaaggtactaaatttcatcataaaggcaaatttattttctataattatgaacatccaaaaacgtatcaagaaacaaattactgctgttgccgggatgaggaaagcataggtaggcaggccctgtggcctgagtgctttcagcaggcaaagccatatttcccatattcatccataaagcttagtgccttctatttatttactctatcctccctccaaaagggctaaacacatatgaaaactatttgactatatccctctaatcctttcaaatacctatagcaattttgtttttaattaaattctatatgctaagcatcggctatgttaggtacaaatctgggcatctaccactttctagagtagcagccttgggccgaccctctgacccttgagtctccaatgtcaggttattgtagcagagaaaatgcgttaaaaagttatagtataatgcctacctggcacaaaacaggacttcaatatacgacgataattataatttattaaatcaaccacttaatatatatcaaaacttaactcttaaaaaaaaatcctgaagcttaaagcaagcccctaaattatcactgtaaattcttaacttgtttgtatacaatcagaacattcctcaatggaacaaaaataaagtcctttcatgtactgcattacatataaagaaagcaaatctcaaaggttaagaaacctatccagtgtcctagaggttgatggtagaaagtgaatacactgcatataaaacattttgaaataaaattaaccaacttttaaggttttagagactgactttcaaacttcagtctataatagaattacctggggaaatctaaaaatgcaactacttgggctctactcgcaaagattttcattcagtgcatgaagtaggggtaaatgaattttttttttaatttttttcagaccaacccaagaacgcagaaatgaatttgcattttaacatatacttcacatgacacacagatctcattttaagaagccctgccttccaaattatgagttaggaacacataatcatggaggaaatataccaaatctataaaaatacagaataacaaaaactgtaagcactacaaatattaggcacactcacttgccaatttaaccataagaatcctaataccagacatagttctcttactttatctcttcaacagagggctcagtctaataatcttataaataagtatagtctaataataaatgcctatgttgatctatatctacctccctaaaattttcattttattcatttctatttttccttcacctccttctaaagctgtttcaaaacttaatttcacaaactgtttttttctatcactttttattataacacccaacacttctgttctcctttgcatcatgtttatggtgtcttatatttatggataatgctacttattaaaactgtctaagttttgtccgtttacacatttcacaattaaaggactactacaacaattttcctaagtcctcctgctttagtttctccttattccagtccattctgcagttaagacttaaaaagttttaaatactgctttcaaataatacttgcaacataattccctcaactccattagctcctcagagtaccatttctttatcttctttccttttactgccaaaaagacgtgaaaaccactagctcagctgctatttttctatctactgaaatttttcttgtaaagtttccatcatttctgtatattcccagtgctttggccccttaatcctacttaatttttgtagcttttaagactgctaatgactcctcacctcctctggcttccctaatgttgtatccactcattttcttccatctctctaaaggcaataaggtcttctgctagttcatcttcctacctcatacatggcctctctccaagtttctgtcaatagccacttttcttaacctaaaccaattttctgcgcaatgtcatccattcccatagcacctctatgcttacaaacccctaactctgtatctttaagtccttatgtctggcatggtatgcctgcaactacatattaccaacggtacacatccatttggatgtctcattaacatctacattcaacgtatctaatatcaaactcaattattttcccaaagaactcactctgcctaatctcactgtcctggttaaggactaaaaaaattggtgccattcattactttctccccctcatttttatttgccctaaccactgtgtaggttgatacttgttcagccttcaaattcttcataatcattaattcaaaaactgtctactagattttgagtgcctactaggtggatgaagatgcagaggtagaaaaactagacataatttcttgccctcatgtggtgaaggaaatgggcacaaataaaaaccacaattaattatgcaataacaatgcacagttaagtgttgtgatggagagatacagggggtgttaagttgtgtactgtaataaaaagtccttagtctgaagaaaaggaaaaccattctttatgagggacaagcaagatttacaagacacactaagaaaaaccctgtgaggtaatgatggtagcactatcagtccagctgctcaaattggaagattctcagtcatattctaaagagtctctctctttcccagtatatcaaattgtttaccaattgctaccaattcatccttagaaattcccctacatttctacattctcacattattccccagtcttttttgattgcttttagttgcttccagaataaagccaaagctcccaatcacgtcagatgagattctacacaatttggtcaaaacctgccagtgcagcctcttcttacagactagaccagacttcaagagaacatgtgtatcatttgcttttatacttccagtgcttgcaaatgtttatagaataagcatcttacaaaagagaaaatttttctcttagggaactagctttcagtcctttagtaaatgcaaggttaagattcaaaccctaatttgtctgattctaaagaccacgcttattcccttgtacttgccttctaatttatactcaaaccctatgaatttccttaaaaatatctcttactccttttttcctcaaacttaccaacactgtcctactacagtgccccattatttcatctggtttcccttttgcctttatcctcaactttgccactagaattatcttcctaaaaactcaaagttacacatatcattctatattcaaaagctttaacactttctcatgccaacagaataaatttctaactccttcacattttatttgaggcccctgccatgtggccctgaccccagccatcccagcactactgcccactatatgacatcatcaccagttaccagatctagtcccatcatttgactattggctataatgtactggatatttgtgtttctgacttcaatgcttttgcttctgaggagacttcactcggaaatggtcctctatccattactaacctctatcccccacccacctatcatgccatgttaaaaactggcctcattctaaacactgtatctcacagggttatctaaactcttatacataatcaccatctccttcatgtcttattatacattcttaataccataaaataatttattaatttctccttatatttattatgttataccttacattacagctatctgtatacatttgtcagtgcctctagttgtaagctgattgatggtagggatcatctcttccatattttacttttcgtaataatggtgactatgttttcttgacaccatacctcccctctacaagaaaaaaaaaaaaaaaaaaaaggaatcaggacccatggcctttgagctagttccaaatgtgactcatagatgaacaaagataccatttcttcccaaattaacacaaatataagtaaatgccaatttaagaaacgttttttcaaagactaaatatgtaagaataaccaaaacaattgtttctaataatgttcctttctctaccagatattaaaacatattaacttaaatggaataattaaaatcggcatgcctttaaaaaactgagtatacactaaatatatgcataccttatgacttaaaaatttcactcttaagtataccaaacagaagtaaacatattcacaagaagacaatcactgaaatgtttagagcagcagcaatattcttaacagttccaaaccaaaaatgattaaatgtccgtaacagcagattaaactatggcatattcttaaaatggaatatcacttccattcttaaaatggaatatacagcgactatcataaacaattactacaaccaacaatgtgaataaatctcacaaatacattaaaagaagtcagacacaactaaatgtgcttgattctagttaaaggatgaaaacaggcaaatctaatctatgctatgagaagtcaggacagtggttacacatggaagaaaaggggtagtgacacagagcacaaggggctacgcaggagctgctgctgttttttgatctgaatgctagctaaacgggtgctcagtgtgtgaaagtgcaacaagctatacacttagaagtgtatagcttaaaacattctaaaaaaaaaaaaaaaaacctcatatggtattagcattagacaaagaggtaagcacaacaagcacaacagaaagctaatttcagagaaagatccgaaagtatctgacagttgctccttctcaaacgagaattttcagaccttggataacaggcagcagaggactataatgcatgaaaggacaaaaacaaaggaggtgagccatccactgcttggatgtctgcctggaggtaatttccaacctgcagtcaatggaggggaaatccagtgagaagacagcagttttactgagttcagaatcaagagatcagagctgagaaagctgaagtgggtaaaattgatgacaagtgccagacaagtgcttgtctgagaaggcagagaaatggcttcagaaatctgccatttgagagtccactgctgagtactaactgtacacgattaaggtaagtgactccatgaagctagtgaaagaggggcagtaagctgaaatattcccagtacttataaaggactgggagactcctaaaattctctctaacctgagtgaagagaacacggtgacactgggagcatttagtaaagactcagaaggatcatgccttaggtaggagctactaccattaaagcaaagccttctctagacaaactccaatgtagccctgaagggataaaactgaccagcaagttatttaggtggctacaaaacaaaacactctaaaagaaaacaaaatctagacacccaacaacaaaatattacaatgtccagcatccaatcttaaaaaatcattaaatatgtaaaaaacaaaaaataaaataaaataaatactaggaaaatacaacccatgaccaagagaaaaaaccaaccaacaaattcagagtgaaaaaattcaagaaatcaataagtaacctgattttcaaacagctattacaaatatgctcaagaattcaaaaaaatacatgaataaaatgaatcaaatggaatttcttgaaatataaagcgaaatatctgaaattatttaacaagggaggagaaaaaacagtaaaatagaagacaaagcaaactgaagcacagggaaataaaaagactgaaaaataatgaatatgatgttaatgacctgtggataataccaaacagtctaacatatgtgtaactggagtcccagaaaaagaggaaatgatgaaagaggagtaaaggtggtaaaaaatatatatatagaagaaacaatggcaacaatcttccaaatttaaggaaaaccataaatgtacagattcaaaaagaaaaaaaaaacaaaaccccaacaactctcagcatggtaatcattgtgcaaatatcatagaacgtacttacacaaatctagattagatggtatagcttactacagaactaggatacatggtatagcccgggtgctcctaggttataaagctgtacagcatgttactatactgaatgaatactgtaagcaactgtaacaaagtgtaagtatttatacatctaaacctagaaaaggtacagtgaaaatatggtggtataatcttaaatgactattgtcaactatgatctcgttgactgaaatgtcagcatgcggcacatgactgtataaccagacttctcatcaaaaacaaatgctgaaagaaaaacacatcaactaaccaagaaaaaagaaacatatatgtccacacagagacttctttttttacacaaatgttcattgtacctttttataatagctgggaactgaaaacagcctggaactgaaaacagcccaggtgtcccttaacagatgaagtcacaaaccaccgaaacattcaacaatatggatgaatctcaaaaacattatgttgagcaaaaagaaactttttacaacatataagtattgtatgactctacttacataaagttctgcgcaagctaaactaagatgaaaacaatctgaacaatgttaggttctaggggtggtgtggggggaaggaataactaggaagaggtgtaggttctataccctgatagaactttctggcaaaggtgtatacatttgtcacagctcatgaaatggtatatgtggtcaactgtattttccaaagatggtcacaatagaagccattccacatgctcttaacaatgtaacactgtcattttttcatcaggtggtggagtctatggcccttctccttgaatctgagtgaaattagtgagtctttcaatccaaagactacagtcatacctcaactatctacagaggactggttccaggactcccatggatcccaaaatccaaggatgcttcgaatcccttatataaaatggcatggtatttgcatataacctacatgcatcttcaaatatgttaaaccatctctagattacttataataccaaatacaatgtaatgctatgtaaacagttgttacaatgtattgtcaaagacaagctctccttgccaatccctgaccaaatgagagattcatgagcaaaataaatagttgctgatatttaaggcactaagtttggggcaatgtattacacagcaataaataactggaacagcatagtaaattctagttaaaaatactaaactactaagttttagttaacatacatgctcaagttaagggtgtggtatactaacaactgcaacttactttgaaaagcataaaaaaagacactagaagaagacaggatggatagatggacaagatagaagacaataacaaatagaacaaaatgttgtgaaattatattctacaattattttaaagtctgtgtggtttgaaaaattgtacgataaaatgaagagtgaaataaagacatttccatacaaacaaaagctgaaagattttgtagccagtagacctatactttagaaatgtttaagaaattttttcaagtaaaaggaaaataacaccagcaacaaacttggatctacaaaaaggaatctccacaaagaaaaataaataaaaatggtaaatatgaaggtaaatataaaggaatgttattcttagtttttaagtttcttcgtaagacaactggcctttgaaagaaatagtttcaaacgctgctgtggaatctataacacatatagaagtaaaatgttaagatcataataccaaaaagaatgagggagagtaaatggatgtatactattccaaaattcttacattatacattaagaggaataatatttttgaaggtagattgaggtaagttaaaggtgcatattgtaaatcctagaagtatcactggggggaaaaaaaacagagggacaagctaataatggagacaatacaaaattccaaaaatgctccattaaccgaaaagaaggcagaaaaggaagaaaagattagacaaatagaaaacaaatagtgtcttaaacacaattatattgccaactgcaataaatgtaaatggacttaatcaaaaagcaacgatcgtaaaaagtcaatctgaaagcaagatgcaactatatgctatctaaaagaaagacattaaatgaccaataagctgaaaataaaaacacagcaaaatgatataatgtgcaaaaattaatcataagaaaggaatggatacactaatatcaaagtagactttagataaggaacattaccagcgataaacagagacatttcataatgataaagacatcaattaatcaaggagatctaacagtcctaaatgtgaacacacctaaggacacaactttaaagactttgcttcaaagcatatgaagaaaaaatgaacagagcagaaggaagataaactcaaaattatagttgaagatttcaacattcctctctcggtaattagtaagtggacagaaaatcagtaaggatacagaagaaatacatttatctatctgacaaagaacatatgttctgaaaagaatgtgaaaatatttgaacagacacacaaaagaaaacttctcaacagcagtcatgaagaaaatgtaaattaagaccataatgactttttacacccattagaatggcaattattttaaataaaaaacagaaattaccaagtgttagaaaagatgcagagaaattggaacccttattcactgctggtgggaatgtaaaatggtgcagtcactgtggaaaacagtatggcagtctctaaaaaaattaaacatacaattaccacatgacccagcaattccactcctaagtacataaccaaaagaattaaaagaagggactcaaacagatacttatataccaatgttcatagcagcatcattcacatagttaaaagttacaaagagtccaaatgtccactgacaaataaataaataaaacaaaaagtgatatatgcacacaatgaaatattactcaaccttaaagaatcaaatttggatacatgctacaacatgaatgaactttgatgactgatacggtttgaatatttgtcctgcccaaatctcatgttaaaatataatccccaatgttgggggtggggcctggtgggaggtaactgggtcatgggagcaatccctcatagcttggtgctctccttgggatacagagtgagttcgcagatgtggtcgtttaaaaagggtgtgccacttccccaccctctctcttgctcctgctctcgccatatgacacgcctgctccccctttgccttccaccatgagtaaactcaccatgagggctccccagaagctgagcagatggtggcgccatgcttgtacagcctgcagcaccaggggccaaataaacttcttttctttttaaattacccagtctcagatattcatttaaggcaacgcaagaatggcctaacgcaaggacattattattattaaatgaaatgtgccagacacaaaaggacaaaaatcgtatgattccacttatatgaagtacctggaagagtcaaattcacatatgaagtagaacagtgattaccagcagatagggagagtaggcaatgaagagttactgtttaatggatagggtttcagactgagaagatgaaaaagtttcagagatggatagtggtgatggctgcagaataatgtgaatgtactttatgtcactgaactgtacacttaaaaatagttaaaatggtatatttgatgttgtgtattttagtaccacttaaaaaaaaacactgcaatgggataccactacacacctctcagaacgtgtgcaattaaagactgagaacatcaaatgctgacatttggagaactggaactctcatacactgatgatgggaatgtaaagtagtataatcatctggaaaatagtttggcagttccttatacatttaaacataaacttaccatgtgacccagtaattccaatttaaggtatttaccctagaaaaatgaaaacatatgttcacacaaaaacatgcacacaaaacagtacctttattcgcaacagcctaaaactgaaaacaatttaaatgttcaccagaaaatgaatgaactgtggtatagtcatattgtatttaaaaaaacgaaacaaacaaaaatctgtgacaaacacaaattggatgaatctcaaaaacatgccaagtgaaagaaaccaggcatggaagagtacatgttacttgattccatggatatgcaattctagagtaggaaaactaataaacagatcagtggttgcctggggccaagagggagaaatgactacagacaggaaggaactttttggaggtaattcaattgttctaaagcttgattgtagtagcagtgatagtgtatatatttatcaaaatcaataaaactatatagttaaaatgggtgcatttcattgtgtatcaattatacatcaataaacttgatttttttcaaagtttgtgagaacttaatatagaaaaaggtggcattatcagtggggaaaggatgccttacaagacaatcagctacccaagtggaagaaaataaaaggtagatataattcccaaaccatgacaaatgcaatccagatctaaaccatatcataccatatccaaaaatatgctgaatgctcatatctaactttctaaattaaagtctataaagtaaaatcacaaaagtatcagaagaaaatacaagagattggccaggtatagtagctcatgcctgtaatcccagcactttgggaggctgaggtgggaggatagcttgaggccagaagtttgagaccagtctgggcaacacactgagatacgttctctaccaaaaaaaaaaaaaaaaaccaaccaaccaaaaaaaaaccaactagctatagtggcacatgtctataatcttagctacttgggaagctgaggcaggaggatcacttgagcccaggagtttgaggttgcagggagctatggttgctccagcccgggtgacagagtgagatcctatctctaaaaagtttttgtaatatatatatgagatcatatttatatcaactttgttagcatgctgaaacccagaaaccataaaagatggacagatttgcctacataaaaactttaaaatttcacatgactagatactataaaattaaaggtaggtagagataatatttgcaaattataataaagaattaaatgatatataaagaatgcttacaaatttaaaaaacaaacaccacaatagaaatggaccaaaaaaccaggcaatttcccaggttatttataaagacttaaacagattttatatatacatgaatcaaaacaaggtaaatgagcagtccctaatatattttaaggaatgaaacttgctaaaattattttttaaaaggtaattggcaaaacctatcaaatatttagattgacatgatctaatggcctgacatcttatttgtaggaatctaccttacagaaaaaataacaggtaccatcattgcaaaagcaaatattgaaaacaaccgaatttccaaaacaggcaaagggtctcataacatcatgaactctcagagttaattcctagttcagttctaaagattgagagaacacatcagatttagagtattccatctcaggtttctcaaggacaatttttcattaaggcctaatttattatattttaaaacatgcttttccatccttttttctgtttttcctcttttccccccacaagcttatatggtaaaattacctgtagttaagtgggcatgtgatatgatgcacagatttaatgcaataatttataagaattatccaactccattctctcagctgctctggtcaaaaaactttggcatcatgttttactcctccctttatttcccactttcatctggtctactaccaaatcctatggactctatttcaacatatatcaagaattcaaccacttctcaccaccctcactgtgaccactctgtccatttcagtcacgtcttaatctgtactaatggtctaccaattggtctgtttctgcccttgtcccctttttcagtctatgattaacacagcaaccagagtgaccttgctaaacataagtcatactttttcactactctgctcaaagacttccaatagcttcccatctcacttataggtaaaaatcaaacaccttattatgatcaaaatatctgtaccctccattctctctatttcccatcaattacttttctaaagctacactggccacacctcgagttcttcaaacacatcaggcactctcactttggggtttccctattcactacactctgcctgaaatgctcttcccccaaatatccacatggctagctctctcatctccctcagttcttcacccaagttaccatttcagtgaagttttctctacctaccctatctaaaatttcccatcatccttttcacctgcaaacacttcccttatttgtttcttctccttagcactatgtaacatatattttacctatctttatgatctctttttaggatttaagtgccatgaaagcaaaggactgagtgggttttatacactgctgtctctaccaggacctagaaaaaaaggcccactacacagtaggtgttcaagaaatgtttactaagtgaatcagatggatgtgtatgtagccaaccatttgaaagattcctataacacagttaagaggaaaaaaaaattatatgaaacacaagttttagtacacaaaaatctatgcacaaggaattaaaaacctgaaatgaaattttaaaaaattcaatttgcaataccatcaaaacataaaattcttagaaataaatttttaaagtaataagtacaagacctgtatactgaaaactacaaaacatgaaagaaattaaagaacaccttaataaatggaaagatatcccatgctcatgaatgagaagacagtattaaggtagcaatacttcccaaatagacctacagattcaacacaaatccaagtcctattaaaatcccagttgcatttttttgcaagctaaccctaaaattctatggaaatttgagaaacccagagacccaaaacaattttgaaaaagaataagttagaatactcacatttcctggtttcaagacttactacaaagctacagtaatcaagagtgtgtgttacccaaaaaaaacagacatacatgtcaatgaacataccttgaaaataccatggtaagtaaaagaacccacacacaaaaggacacatactgtatgattcccatttatatgaaatatccagaataaataaattcatagagacaaagcagattagtggtttccagaggccaggaaagaatggggaatggctgctaacaggttaggatttattttggggatgatgaaaatgttctaaaattcaatagtggtgatggctgcagaactgtgaatatactaaaaactttaaaagggtgaattttatagtatgtgaattatctcaataaagctattaacagttttgaaagttagagaatatgtttggtaggattttttttaaatactgcctccccaaaaggaaaaaagctgtatgtatatcagtacttttacagctatcttacattttatatttgattggtaatttccttccaggcatttttttccctctacagttaaacacacttaacaactgttaagttttagaattggctatgaagcgaagagaaacctttcatttcttcttatacttaaaaaaaaatagctttttatttttcttttctgtatttcctcatcctcaaaaatagattctacacaccaatatttgagggatggtggggcaactaccacaaaatacaagaggctctcttctggaaatgtaaaaatgttagaattcctaggaacttttcatgatttatgagcctaacctaacatttaaaactgagcccatgctggtaaatctgggctacacagtcatacatacatagaactctggaatcacaacacatccactgtgcactggaagagtactgtaatctccttctaatgtgcaccttggctctcccctcccttgggttctttgaaattttttttttaaataaggtatgtttatttcttatttacctactaactacagaaggtagactcacaatgtgccaatattaaaatgttatcattcctcattaaaatatttacttaagtgttttattacatgacttaccagcaatggaagaatctcatctgagagtagttctcaactgtcatctatgaaaatctttagaaataccaaatcatcagaattactttaatttcctggcttttaatcataaagcattcctactggtcaacaattctacaatctgaaaacagggacatctgtaccatatagtcccaatgatttattattctgaaattttcctctgggttatttttacactgtaattagagttcaaacttccatagcgcctagcctaaaattaaacccagaattatgccaatttatgcctgctatatatgcacacacaaaagacttataatgcaatatactaaaagaactaaaggtaggtgggtttttccttgaaggaatcatagctacattattttcaagtttaatctgttacattcacctgcctatcaaataaatgtagcacttaaacgcataaaacaaaatttgatttagtgacaaaaaaccattagcttctaatttaacttcaaaacgcttttcaaaaaatctaccccatctaattctaagtgaaccagaccacacttgatagaaaactgttgttctaaaaaccatacgtacttaacacaaacagtaaacatatgagaacatttagtcttctattaatgtcttacaaaatatttcaatgtggctggttataatttttttttttttaagggacagggtctgtcaccgcggctggagtgcagtggtgtgataacaactcactgcagcctggaactccagggttcaagcaatccccccacctcagcctcccaagctgggctaattttatttttcatagggataaggtctcactttgttgcccaggctggtctccaattcgtggcctcaagtgactctctcacctctgccttatatttccgtttgagctgttattatcaactggagtaacatttctagttggggaaaaaagaactgatccttatctgtagatgaacacttatacattcagcacttacaaataactgaatgtgggcatgaaaaaaagaatgacagatgataaacatttactgttctcaaaataaattacctaatctcagttgagataaacacgactcagaattcaattaacagtataatataaagaagccccaaaccaatgagtgcaaaaagaaagactctcaaggaaggcttccctgagtaatatttaggttgagccctataagatagaaggaagatggataactcaagaaactaaaagcagcctgtgtggtaagatggtactgaccaaaggggaatgcacaggaaggtaaggctcagaaagtagacagaaccctatcaaagcaaaattttaaatagaaagcactcttctatttcaaaataactgttatttgttcacaataatacaaaggaattataaactactaaaactaacaaaccaaagtgggcaacataggaagaccccatctctacaaaaaaaaaaaaaaaaaaaaaaaaaaaaacccacaaaacttagcagggcctggaggtgcctgcctgcagtcccagctacttgggaggctgaggcaagactatcgcttgaggccagggggttcaaggatgcagggagctatgatcatggcactgcactccagcctggggaagagagggagaccctgtctcctggaaaaaaaaaaaaaaaaaaaaaggtgggtggggtggggagaattcaataattaggacgaatagactttaaaatgtagtttatacacacagtggaatactactcagctataaaaataagaataaaaccctgtaatttgcaggaacacggatggaacaagaagccattatgttaagtgaaataagccaaacacagaaagacaaataccacatgttctcactcatacatgggctaaaaaagtatatctcaagaagataagcatagactggtggttactagcagccgaagtggggagtgagaggacaaaggcagaagaacataactgtatttattattgctgaactgtacacttaaaaaactgtacacttaaaaaatcattaaaaatgaactgtacacttaaaaaagatggtaaattatgtatgtatatttaacctcaatacaaaattttaaaaattcaatacttaatgctggaacaactagcttttcatatttaaaataaaaaatcctaactcctttcagatgaacctaaatgcaaataacaaagagtaacaaaaaatcctcaactattagcagacaatataaaaagaggatttcttaaacaaaaagcacaatcataaagaaaaagacatgatttttacatcaaaaattaaggctcatactaccagagaatactacaatgggcaggattttatattttactcttattctggtaactttctttggctgcactgtaaagtaagaaggttggatgaaatgatcttcatggtccttttcaacataaatgttgtacgatagtgtgcctttcctttaaaaacatttatttttgagatatttaaaacatacagaaaataataaatttcctatccttttacctacgattcagaataatcaagcaactgtaaattaaaatgagatagcatttcacatgcctcaaattagtaactattttaaaatctgacaatcccaagtatgggtgaggatgctagaaatgcccacataatgctgataaagtatacatgggcatatccatttaggaaaagaatttaccaatatctagtaaccagcaatttcacttctacggtttttcccaaaacacctgcacatacactcatgtaaaaataaacactgcagcattatttataatagcaaaaagaaaacaactcaaaatatccatcaatagtgggacacatacattttatctatgcataaaatgaagtgccatacagcagtgaaactgaataaactacatgtacacgcatcaacatatacacctcaaaaacttgatactgagtttaaaaaaatcaagctattgaaagacagcgttatacatgtctgtaaaaatttaatacaaaaaccaacaccacatatcacttacagatacatgtacacatgtatagtaaaagtataaaacaaggatgtgaaatttacttaagaatctcaagacagttgttactttgtgtagagacgggtaacaggacttgaacagttggggttgttaaaagtgattatataactgcatcctttcccccaagggataaaaatggacataatttatatttccaggtggtggataaataggcacttgctatgtcattttctggatgttttaaaaattttacaattaaaacatatacacttattttaaaaacaaacaaaagacatattagcatataatgtccaagctgataattaccttggaagattatctaatataaacctccctacttcactaaaaacaaaattacaaaagatatcagaataaaaatatgatacaggctggacgcagtggctcatgtctataatcccagcactttgggacgccaaggcaggaggatcacttgagcccaggagtcaagaccaggctgggtaatatagtgaaacttcatctctacaaaaacaaacaaacaaacatttttttaagaatgtaataggattggtgtggtggctcatgcctgtaatcccagtgctttcagaggttgaggcaggcagatcacctgaggttaggagtttgaaaccagcatggccaacatggtgaaaccctgtatctactaaaaatacaaaaattagccgggcgtggtagtgcacacctgtagtctctgctactcaggaggctgaggcaggagaatcacttgaacccaggaggcggaggctgcagtgagctaagactgcaccattgcacaccagcctgggcaacagggcgagactacatctcaggaggaaaaacaaaaaaaaacctatatatatatatatatatatatttatatgtattatatatatataatacatatatataagattatatatatattatatatataatacatatatataagattatatatatattatatatataatacatatatataagattatatatatattatatatataatacatatatataagattatatatatattatatatataatacatatatataagattatatatatattatatatataatacatatataagattatatatataatatatataatacatatatataagattatatatatattatatatataatacatatatataagataaatactattgtagcagggcaattttggacaaatactaggttatctgaaacagcactttggggaattagatcttgaccatttaagagagagattagccccagtttctcaaaatctggcactgactagcaatatggacaatgtgtgcaccgccctcgttccacctcccctcctaggaatgccatgtcaaattcagcacaggcataggcagtaaaactgacccctagttctgcctatcactatttaaaattactttaagtgttgaggactgtccccacagcagatatctaaaagtaggcctgaaagaactagaaagtagttcatgcatccagcagttacaagtgcctaaaactgtacatgaaaaaacaaaacaaagaaatgaactgagagcaaacatttactgttttcttataatcttcaatccaggatttaagaaattatttaatatcagttgagatacgtgaccaacccattctccagctgagatccatctatttttaaattcactcccccagcctttcattcagcctaaaagagggaataagaatgggaaggtgggaaggacttatcccatactgagttaaataagaccacaagatcttttcatttttacaatatttgaaatacagtacactgagcaataaatttaaagaaatatgcatgatttgaaatgcagaaatcttgatttatgtgtataaaagaccaaaattagctcagttcgtctaatacactacacttaagtgttcttcaatactacagtcaacttttcagaaatattcccattctgtgaagcaggatgtattcctaccttgattaccaaactttatccacgtaacttcctattctcccactctgttctttaaacatgttcaacatgttacagagatggcaaaatgtgttacaaaagggaatgagaatgaagcagcttaagtaattaggaaaactttacacttcttagaaactgaatttgaatgatcttaaacagcatattttcttttcttttcttttcttttttgagatgaaatcttgcttgcccaggctggagtgcaatggtgtgatctcagctcactgcaacctctgcctcccaggttcaagcgattctcgtgcctcagcctcccaagtaactgggattacagacgtgtgccaccacgcctagctaatttttgtatttttagtagagacagggtttcaccatgttggccaggctggtctcgaactcctgacctcaggtgatccgtgtgcctcggcctcccaaagtgctgggattacaggagtgagccaaggcgcccagcctaaacagcatattttcaatcaccaacacacaacatgaccactgacttcagaaaactaggaaagaaaaatgttacccaattaatctttgtgtgaaacaggatttatccattagtatacgtatcacataccatagatgcacaaaagattttttcaattcccaaaacaaaaacttaaaatatttagcaaagataatataaaaatccttatttatggcacgctgtaagattatcaatattggtgcatataaccacagaggcacaatagaattcttaggaaaaatgtattaagacaattaacaagctggaaataacccatatttccccttatgacccattagctttatatagaaaacactgctgtgcacttcatcctttgctttctaaagaacagcattatggttcacatctgttaagagacaaaaaagtatttgttggaagtacgaaaggaagaaattcctgtactgttacatgcagtgccaaaggaatcatctgagaagaaaataaagaacatgagtttaacatgagctttagagagggattacaagagtgcaagaaagtgacaaaatgtgacatatgtccatagtgaatacatggtgctttattgttttcagtatttctatatttaattaggaggtggaaagtttcagaatttattctgcatcacaaagattataaaaatatatgagttggggtgttggctacagtacacaaaggcaattctaagactacttattaacagaagcttgaaatggaaaagccatcccttctgatttcattacatgaaaagaacctgtgtagaagtacagcaatggtagcatcttcattcagcccacagctatgtaatttgtatgcaagagtgcttgtcttaaatatgaaaaggaacatcctgaattgctgaaagtatatacaacgggcacacatccagaactaggaaagagctaccaagcctgcatgctacgaagacatgggtcaaaaaatttttctcatgtttggtttctataactaaagtctgtgctagactaacctcaattgatcctgaggagatgaacttctggaacacacaaaactgttaagagtcacagcattagactctacactgtccagccaacagttttaagaaaaattttatcctacttgtatgagtgttcagggctcatatactacctctatgctcttacttgaaacacagatgcagaccttaataaataaagtcttacatcagactctcttctataattcacatgtgattccttacacgagattcctgttcagatttcctgaaaatgaactataggaataatcttatccaatatgattctatgtcccctaaaaatatcttttcctttcaggtcaatcttatgattcacttgccattgatcagattaacacaacaggtctggtacagcaaattacaaaagagatttgacttttgattaatacactgaataatgtatcacaaactattaagatccattgtccatgtcaaatggagttcacatatttaaaatgaattcacacactaaaaattccccaaaacaacgtttctaaaaagtttttttttttttctttgagaggcagtctcactctgtcgccaggcagtagcatgatcttggctcactgcaacctccgcctcccgtgttcaagcgtttcccctgcctcagcctcctgagtagttgggactacaggcatgcgccaccacgtccggctaattttttttttgtattttagtagagatgaggtttcaccgtgttggccaggatggtctcgatctcctgatctcgtgatccgcccgcctcggcttcccaaagtgctgggatgacaggcgtgagccatggcacttggcctctaaaaagctcttaatctacattttcaagaatgatcacgtttgaaaagcatactcttttaaaacaaagcaactatcactttcatttgacaaaagaaggaacgaaggcttcaaaagctaaataacctgctcatgaccattacgaagctagttaaaacaacctcaagaccaaaagacagtgctcattccatttcaatgactctgatgcacttaaaattttataaataatttttagggatatcagtcataaggcttagaatcaaatagtaacgactcatgtacaaagaccagtattttttaaaaatgctcagctgggcatggtagctcacacctgtaatcctagcaccttgggaggccaagccgcttgagaccaggagtttgaaaccaacctgaacacggcaagaccccatctccacaaaaaaattaaaaaataaaaaaattagccaggcatggtggcatatgctaatcccacctactcaggagggtgagatgggaggatcactccagcctgagactgcaatgagttatgacagcaccactgcactccaacttgggcaacacagcgagaccctgtctctaaacaaataaacaataagtaaaataaacaaaaagaaaatgctaactttacttcactctcagataggcctaataattaataagcttctttttgaattattatccataatggcatttacctgttattgataactcagatcaaagcactactaagcaacatttttgatagcaaatgaaaacaaaagctggcaaagaaactgtgtattaataagtcatttgattaaaaaaaaggacttggccaggtattgtggctcatgcctgtaatcccaacacactgggaagctaaagtaaaagctgaggagttcaagaccagcctgggcaacacagtgagacccccatctctataaaacaaaaatttttaatattatctttttacaaaggacttatttatatggcatcttcaagtatttcaaacatttcgtgtttggattatggaatatgtctccagaagaattaacactatttctatttaaggtaattttacatcatttcctttattagaagaaataacagatctgcagatggcattttgtgaaggctgccttctattaatagtgtacaaaacactcatatgtctccaaaaaggtgggtgagtaatcacaaagcaagtataactattcatcccaaaaggtaggacagaacatgtgccaatgtgtgcagagtcctgaactagagacatggactctggttctggttctgacacctgggtgactttaagaaaatcattttaaagctttgcactccaatttcctcttgtataaaatgactggagcagctgacctcatagacaatcctactcaggtagcatctatccatgtactgccagaagacagaatgataatcatgccccccaaaattagagtatttgaagacaactgccggagtaaaaattttaaattctatatacatacacacacacacacacacacacacacacacacacacacacacacacacacaaatactaatacactacgtgccagatactggggtggtgggctgggaccaaggaatgaagtaatgcatgtgccagagggttgaactttttaaaaggagtaaaaaagtaaatctttacagtagcagctggtgggtaggaggtattgagtccatagaactgctcttagattggaagggcatgggaaaatgaagttccattatgtgatagggttttacacacacacacacacacacacacacacaaatgtgagaaagtcactcaactataagcattcaaaaaagacagacatctttcttgtctttgtgggtcctgtacttagctcagctcatagaagccacaggaggaacctaataaatgttagttgatcatttactgatttaccaataaccaattcatgcctgctctagtgctgtggtctgaatgtgtcccccaaaattcatgttgaaagcctaacctccaaggtgatagtattaagaggtggggcctttgggaagctttgccatcattaatggaattaatgcctctataaaagaggccctatagagccccgtctactcttctactacatgaggtaatggtgaaaagacagctagctatctatgaacaagggaagagggccctcactaagatgtcaaatttgttggtaccttgatcttggacttctcagcccccagaaccgtgagaaataaacttctgttgtttataagccatgctgtctgtggtgttttgtaatagcagccagaacagactaagacatctagtaacacattctctggtaaacactaggaattcctggccttaaaaagttcatagctaatgagaaaagaaataaacaacataaaggataacatgctgtagtccactacatacaaggtgcttccagaccattcagaaaaactggataggaagatttctaaggtaatacttattgagtgcctacgtgttaggcgttttacatactttaagcctcacaactctggggaagtttcaccaacccattttacagatgacaaaactgtggcttaccaagattaataaggccagaattaaaattagggtctaattccaaagatattaccactatacataccaagatgtcttgttactacattttatccttacatttggcagtgaggggaaaactcaaaaagcagtcaaaaaacttttgtcctgaaccaacataaaaagagcacctaagacttcatccagtattttaccgaaagatcacttctaaaagtttgtcttcaccccgatctaaaaattagaaaactaattttctttcagcagctgcatatgtacataatgtaatgtttctacatttagacctacacaattataagtctaaacaaaatatgtgtaacatgattggagaacataactagcagtcatttaagaaaatggacatttggaaacatcatttcaagagcttgggatgaaaaattttgctatgacctataaatctggatcattccactgactgacactgagagaaacagtgtattatcacagtttacacagtaaatttttttggaggggagagggaggagattgaaatagaaatgatcgaaatagaaattatctaaagtttaagaaatacaactgattaaatgttacatgtcaaagacactgtaggtacccaataaatcctgttaaatggactgcacaagtgggatgagaacacgttttccccacacctctgactagtatgtacctttcttaggaagttattttttcagccatgggaaaaaaaagggcagaatttaggacagataaaacataagtagcttataaatcctctgaaaggaaatcaaaacacagtattttgtatctctgtataaagttaagctcctcagggacaggggcaatgtccagaggatagtgagcatactacttagcaaactaatgcaggttaataaatattgacacagtaagactagcatagtttacattctaattttgtaaagattataagttacctcttcatattctgttcttttatttctcctgtgtatattataaatacacaaagattgaaaattatttcttgaagctatttccttttttattttttggtcaactgtattagtgtttcttaaaagggcttctggtcatccttagggcttatcagtagcatcattaataatgtattcatttcactaaaaatgtggtaagtagcttggatttaaaaacaggatctaatttcaaagctatttccactatacacaccaagttacaactttcttatctctcctaaattctaaattttacatgatttaccaaatcacttcttaagtaagagtacttattgatcagaagtgtgagacaaacaccttatcccacttgtccaatttattcaacaagattgattgggtacctttgtgtctctgacaggtaactttcaacagttgtatttcttaaactttaggtcgtctcccaaaaaaaactgtaataatttgctgcttctctcaatattgcaggcagtaaaatgatccaaaattacgggtcatatccacatttcttcatgattgaggttaactgtgcactgtaaaccccatatgctattagtttacattttcaacagcaccctcgccacttaataatctcaaacagattttggactgttactaatttagcatatccataaaaagtcatttaaaaaatgtagacgctaaattctctttcaaggttgccaagcttcaccagtgtctgtattaaaattatttctaaaattttacggactaaggcatttggtacattcaattctacctttaccaacaaaagcctttaccaccaagatgaggaaagcatccttttcattttctacactgaaaaggggggggaaaaaaggccaactgcttgcatacaggtctgcatataacacagcagtctctggcaaagccaataactcacgttcaacttcagaaatcctggtggccggtaacacagagtaacctgtgcgcacaacccttgggcttgacataccacttcatccgccctcccttcccatcaatccacccccaaaaccccaacccaccaagcacacggctaaatatgtcttccccaagagagccaaaaaccttgaaaacgccgagaaagggctcccctttgaaggaaagggcctgcccttccctgtctggggccccggctggctcgaagagcctggctcctaggaggcccaaatctcgacgcctcgcacgtcccgccccgccccgggcccgctcgcgtcccctcgggcgacaaaaccctcccgccgtcgctcagccaggactgacagttacggctgcagcagccgcggccaccaggggcctacttctggcaccagccccttcggaccacgcgcccccaaacactcgcctcggcggcggggggcggggaaggggggtgtcgacctcgccacagcgggccccgaaggccggccgagtgacggaggggagccagcgccgcctggcgcaggccgcggcaacactgacctgtcgtcgcccccgcgcctgggctgcggcggccgcctcactggtcgtagtcgccctcgcccgccgcctccgcccgccaccgcctcgttctctttcgctgccgccaccgccggggctcatgcgggacccgcgcttccttatccggaaaacgaggccgggaaagggagcgccggggccgccgaaatcccggcgttcgtcgccagccgccgctgcctgtccacaccggggggctgaggggccctcctgccaggggctacaggccgcgagctattccgaggaggagccgaaggaggcgccgccgcccgcagccgagcgcgccgggtcggcagaggtgaagcgtaagtaggcggcggatggcgggcgcccgcgctggcggatggctacgcggcggaggggtgcgcgagcgagcgaagcctggtgtgtcgggtcctggcgaagggaaaaggccccgtcgtctcctgtagtcaccccgagcccagcgccaccatcttgggagacacacggatctcgcggccgcggcgcaagacgggaggactggctgggcgggccgagtatcccggcaggcagcgcgcgccgcccggccgggcgagggctccaggccgggacgcggggacgtggggcggggccaagacgcgcgggagggcgccgcgctccgcccctccttccttcgccggccccgcctccctcccgcttgccgtcgccgccggcgcacgggccattgggaagaggaggtggcctgcggcccctcggagtcccaccaggctcggtcgccatcttgcgactggacagaaagggtaatccctctttttagtttctgctgtctgtgacccgaaagaataaacctgggacttccggaagccctctgggcacccccccccccaggagggttgcagagccccttggtgtacccagcagaggaacgcctcagactttgttgggaaacgaatggctctgaaagttagctgaagccgctggaatagccccccagccccgaggcggggcaggtgcctgccgttattggcttttcgaccccaacccttttctatctggagctgcctttgtagatgttgcaggggtgccccgagagtgcaggccagattttagaggaccaaggtcatctacttaggcctcttgccaacacaggatgtgtcaactagtttaccagagacgaaggtaaagtcccgtctcctgcagttgttgacgttcagtaggtcgtcggttaagaaaagtggctccctggttgaccccagctggatagaggctaattttgatccatatgacagctgaacgtagttaaagccattaaaattaaatccatttaaagtcatatttggtaccagggtcaccattttaaaaggtgtgtgtgtgtatgtgtgtgtgtgtgtgtgtgtgtgtgtatagctttacaacacttgctagcaaagccaaaagagtatcactaacaattcatagtgttacaacttgcaactttgttgataagcccttgaagtactagatgagtacccatgtctagtattcagattttttatatcaacagtcgtacatagcagtgtatcttttttaaatttatttttatttttaaacttagaaatggtgtcttgctatgttaggcccaggctggtctcgagctcctggcctcaagtgatcctcccacctcggcctcccaaagttttgggactacaggcatgagccacagtgctcggccagcagtgtaatttttaactgtcagtctcggaacatcttttttgtatagccaagtgtgtgggtgtgtgtgtgtatccgcctcacaactataaccaaccattgaaaaaccaacaataagctagaagaatttaagttattccaggacaactgatgataatgatagtattaagccatattcgattttaagatgttttaactcagctctttactcacttttcatttcctctcattacacatccacatttggaaactatttgctgttatatttcatggaaaggactagtaagaattataatctttaaaaaaatttatcttcgcaagttttcaaaataggcaacaaagaatgtaaatctttaaggactttattgttggactaattaaagcataccatttctactatatctagcatatggagatacttataggtattcttccttttaagtagaaattgacaataaattaagtgtaattttataatggcctggtgtatcaaagtgtggcggaaatccctgagttccaaaaagattaaagaccgaagggaaataagtctgcttttagctagatgtcagaatgactattcattgctttactgagatcaaggaggatcttaattcctcctggagaaattacgtatatccgttttagttcattaattttaaatctgtattcttatgtgtgacattagtattagaattctttcaagatttcactgtgctttttgttttatccattttcaaatttagaaatgtttgctcatcaaacttaccaacataaatactttcaggaatccttaagatactagcagtgttccacttccctatacacctgtttatatg

SEQ ID NO: 2 - DNA, 20 bp, synthetic construct
  source 1..20: mol_type = other DNA
ctcccccagttctggaatga

SEQ ID NO: 3 - DNA, 23 bp, synthetic construct
  source 1..23: mol_type = other DNA
tacacagggatttgagcctgcta

SEQ ID NO: 4 - DNA, 26 bp, synthetic construct
  source 1..26: mol_type = other DNA
cccacagatcaagcattccccaaaga

SEQ ID NO: 5 - DNA, 20 bp, synthetic construct
  source 1..20: mol_type = other DNA
gcccgaagtgcctattcctt

SEQ ID NO: 6 - DNA, 24 bp, synthetic construct
  source 1..24: mol_type = other DNA
tggtcaggagaacataggcataaa

SEQ ID NO: 7 - DNA, 26 bp, synthetic construct
  source 1..26: mol_type = other DNA
actcccagggttgatgggctacatcc

SEQ ID NO: 8 - DNA, 20 bp, synthetic construct
  source 1..20: mol_type = other DNA
caccctgatgtcaccgaatg

SEQ ID NO: 9 - DNA, 23 bp, synthetic construct
  source 1..23: mol_type = other DNA
gcgttctattagatgctttgcag

SEQ ID NO: 10 - DNA, 30 bp, synthetic construct
  source 1..30: mol_type = other DNA
actgaggttctcctgatcttttacaagctg

SEQ ID NO: 11 - DNA, 20 bp, synthetic construct
  source 1..20: mol_type = other DNA
ggcaaattcaacggcacagt

SEQ ID NO: 12 - DNA, 20 bp, synthetic construct
  source 1..20: mol_type = other DNA
gggtctcgctcctggaagat

SEQ ID NO: 13 - DNA, 27 bp, synthetic construct
  source 1..27: mol_type = other DNA
aaggccgagaatgggaagcttgtcatc

SEQ ID NO: 14 - DNA, 22 bp, synthetic construct
  source 1..22: mol_type = other DNA
tccttccctaccttagtcttga

SEQ ID NO: 15 - DNA, 20 bp, synthetic construct
  source 1..20: mol_type = other DNA
ccctcttgaaccaggaaaca

SEQ ID NO: 16 - DNA, 25 bp, synthetic construct
  source 1..25: mol_type = other DNA
agatggcagcccacatttctactgt

SEQ ID NO: 17 - DNA, 20 bp, synthetic construct
  source 1..20: mol_type = other DNA
atgttgcttgcactccatca

SEQ ID NO: 18 - DNA, 20 bp, synthetic construct
  source 1..20: mol_type = other DNA
acaacataaggtcttattgt

SEQ ID NO: 19 - DNA, 20 bp, synthetic construct
  source 1..20: mol_type = other DNA
ttttcaactccagaattttc

SEQ ID NO: 20 - DNA, 20 bp, synthetic construct
  source 1..20: mol_type = other DNA
ttcagtcttatacagaaatg

SEQ ID NO: 21 - DNA, 20 bp, synthetic construct
  source 1..20: mol_type = other DNA
ggactgacacagaaaactgg

SEQ ID NO: 22 - DNA, 20 bp, synthetic construct
  source 1..20: mol_type = other DNA
agggtagaagactagcatac

SEQ ID NO: 23 - DNA, 20 bp, synthetic construct
  source 1..20: mol_type = other DNA
ggccattcattcagccacac

SEQ ID NO: 24 - DNA, 20 bp, synthetic construct
  source 1..20: mol_type = other DNA
taaagattttatgaaaatac

SEQ ID NO: 25 - DNA, 20 bp, synthetic construct
  source 1..20: mol_type = other DNA
tttagaacatgtgaatttca

SEQ ID NO: 26 - DNA, 20 bp, synthetic construct
  source 1..20: mol_type = other DNA
agacatatcacagttgcttg

SEQ ID NO: 27 - DNA, 20 bp, synthetic construct
  source 1..20: mol_type = other DNA
aatataatgtagtatgacca

SEQ ID NO: 28 - DNA, 20 bp, synthetic construct
  source 1..20: mol_type = other DNA
gaggacactggcacatctat

SEQ ID NO: 29 - DNA, 20 bp, synthetic construct
  source 1..20: mol_type = other DNA
ttaaataataaaatatattt

SEQ ID NO: 30 - DNA, 20 bp, synthetic construct
  source 1..20: mol_type = other DNA
attggagcaaaaagggatca

SEQ ID NO: 31 - DNA, 20 bp, synthetic construct
  source 1..20: mol_type = other DNA
aattattccctatatcctgt

SEQ ID NO: 32 - DNA, 20 bp, synthetic construct
  source 1..20: mol_type = other DNA
caactgttaccaagacttca

SEQ ID NO: 33 - DNA, 20 bp, synthetic construct
  source 1..20: mol_type = other DNA
atctgcgaatagaggccctc

SEQ ID NO: 34 - DNA, 20 bp, synthetic construct
  source 1..20: mol_type = other DNA
aaggtttttatttcatcact

SEQ ID NO: 35 - DNA, 20 bp, synthetic construct
  source 1..20: mol_type = other DNA
gcccatggatggttgtcaaa

SEQ ID NO: 36 - DNA, 20 bp, synthetic construct
  source 1..20: mol_type = other DNA
taggttgcataaagccaggc

SEQ ID NO: 37 - DNA, 20 bp, synthetic construct
  source 1..20: mol_type = other DNA
cacacatcttgttccctcaa

SEQ ID NO: 38 - DNA, 20 bp, synthetic construct
  source 1..20: mol_type = other DNA
tttttttaatcctctgatga

SEQ ID NO: 39 - DNA, 20 bp, synthetic construct
  source 1..20: mol_type = other DNA
agtctcttttctttcggtgc

SEQ ID NO: 40 - DNA, 20 bp, synthetic construct
  source 1..20: mol_type = other DNA
ggaaagttcttctctctcct

SEQ ID NO: 41 - DNA, 20 bp, synthetic construct
  source 1..20: mol_type = other DNA
atttggtctaaagtgaagtt

SEQ ID NO: 42 - DNA, 20 bp, synthetic construct
  source 1..20: mol_type = other DNA
ttttgtgagatttttgaata

SEQ ID NO: 43 - DNA, 20 bp, synthetic construct
  source 1..20: mol_type = other DNA
tgttaaatgcttttctaaat

SEQ ID NO: 44 - DNA, 20 bp, synthetic construct
  source 1..20: mol_type = other DNA
ctgatgattgattgtttcct

SEQ ID NO: 45 - DNA, 20 bp, synthetic construct
  source 1..20: mol_type = other DNA
tatgataatgtgtagttttt

SEQ ID NO: 46 - DNA, 20 bp, synthetic construct
  source 1..20: mol_type = other DNA
aagggtaatacggacctcat

SEQ ID NO: 47 - DNA, 20 bp, synthetic construct
  source 1..20: mol_type = other DNA
ctattttttgcttcccttat

SEQ ID NO: 48 - DNA, 20 bp, synthetic construct
  source 1..20: mol_type = other DNA
gaattcttagaaagttaatt

SEQ ID NO: 49 - DNA, 20 bp, synthetic construct
  source 1..20: mol_type = other DNA
tgccatcttcaagactaagg

SEQ ID NO: 50 - DNA, 20 bp, synthetic construct
  source 1..20: mol_type = other DNA
aatggaaaagatgtatcacg

SEQ ID NO: 51 - DNA, 20 bp, synthetic construct
  source 1..20: mol_type = other DNA
aactttggcagctattcaat

SEQ ID NO: 52 - DNA, 20 bp, synthetic construct
  source 1..20: mol_type = other DNA
gacactaggttttgcaaaag

SEQ ID NO: 53 - DNA, 20 bp, synthetic construct
  source 1..20: mol_type = other DNA
tatgaattttcaattcaatg

SEQ ID NO: 54 - DNA, 20 bp, synthetic construct
  source 1..20: mol_type = other DNA
cacttaagggaactttcaga

SEQ ID NO: 55 - DNA, 20 bp, synthetic construct
  source 1..20: mol_type = other DNA
gagatgatgttaagctttca

SEQ ID NO: 56 - DNA, 20 bp, synthetic construct
  source 1..20: mol_type = other DNA
taagacaagtggccatgaag

SEQ ID NO: 57 - DNA, 20 bp, synthetic construct
  source 1..20: mol_type = other DNA
ctctgttctgtctcaaaaca

SEQ ID NO: 58 - DNA, 20 bp, synthetic construct
  source 1..20: mol_type = other DNA
tataagaaagaagattacag

SEQ ID NO: 59 - DNA, 20 bp, synthetic construct
  source 1..20: mol_type = other DNA
aaatgttaatagactgcgat

SEQ ID NO: 60 - DNA, 20 bp, synthetic construct
  source 1..20: mol_type = other DNA
ttaaactccccagtcaaaag

SEQ ID NO: 61 - DNA, 20 bp, synthetic construct
  source 1..20: mol_type = other DNA
atttacttcaaacaggagct

SEQ ID NO: 62 - DNA, 20 bp, synthetic construct
  source 1..20: mol_type = other DNA
tcaggaaattaaagcattca

SEQ ID NO: 63 - DNA, 20 bp, synthetic construct
  source 1..20: mol_type = other DNA
cctaacctggatctcagata

SEQ ID NO: 64 - DNA, 20 bp, synthetic construct
  source 1..20: mol_type = other DNA
tacagcaaccctagaaaact

SEQ ID NO: 65 - DNA, 20 bp, synthetic construct
  source 1..20: mol_type = other DNA
atctttggcagatgtaacct

SEQ ID NO: 66 - DNA, 20 bp, synthetic construct
  source 1..20: mol_type = other DNA
gagtattatccaaaagaaca

SEQ ID NO: 67 - DNA, 20 bp, synthetic construct
  source 1..20: mol_type = other DNA
aaagcccaggattaggcagc

SEQ ID NO: 68 - DNA, 20 bp, synthetic construct
  source 1..20: mol_type = other DNA
ctacaaagagtgaatcatga

SEQ ID NO: 69 - DNA, 20 bp, synthetic construct
  source 1..20: mol_type = other DNA
taatcttaagtttaagtgga

SEQ ID NO: 70 - DNA, 20 bp, synthetic construct
  source 1..20: mol_type = other DNA
aaaaagacatagaatgacag

SEQ ID NO: 71 - DNA, 20 bp, synthetic construct
  source 1..20: mol_type = other DNA
agatacaaatttaaaaaagt

SEQ ID NO: 72 - DNA, 20 bp, synthetic construct
  source 1..20: mol_type = other DNA
ggtagccccaatacagattc

SEQ ID NO: 73 - DNA, 20 bp, synthetic construct
  source 1..20: mol_type = other DNA
cttcaacagcagacttgatc

SEQ ID NO: 74 - DNA, 20 bp, synthetic construct
  source 1..20: mol_type = other DNA
ggtccacacagagttcaaat

SEQ ID NO: 75 - DNA, 20 bp, synthetic construct
  source 1..20: mol_type = other DNA
ctttgggacatcccaaagtt

SEQ ID NO: 76 - DNA, 20 bp, synthetic construct
  source 1..20: mol_type = other DNA
tacacatcttgtatacaagg

SEQ ID NO: 77 - DNA, 20 bp, synthetic construct
  source 1..20: mol_type = other DNA
taatactttcttgagtaata

SEQ ID NO: 78 - DNA, 20 bp, synthetic construct
  source 1..20: mol_type = other DNA
gggtggttggattgctttat

SEQ ID NO: 79 - DNA, 20 bp, synthetic construct
  source 1..20: mol_type = other DNA
ctgcacactgtacaggaggg

SEQ ID NO: 80 - DNA, 20 bp, synthetic construct
  source 1..20: mol_type = other DNA
ttgattcactgcacactgta

SEQ ID NO: 81 - DNA, 20 bp, synthetic construct
  source 1..20: mol_type = other DNA
gtgcaggaaggaggttttgt

SEQ ID NO: 82 - DNA, 20 bp, synthetic construct
  source 1..20: mol_type = other DNA
atacagtatatacatcatcc

SEQ ID NO: 83 - DNA, 20 bp, synthetic construct
  source 1..20: mol_type = other DNA
aagtttaaaacaaaaaaagg

SEQ ID NO: 84 - DNA, 20 bp, synthetic construct
  source 1..20: mol_type = other DNA
aatgtctgttctttgtggta

SEQ ID NO: 85 - DNA, 20 bp, synthetic construct
  source 1..20: mol_type = other DNA
atacctgcttttgtgacaat

SEQ ID NO: 86 - DNA, 20 bp, synthetic construct
  source 1..20: mol_type = other DNA
gagtgtagctcatttcagaa

SEQ ID NO: 87 - DNA, 20 bp, synthetic construct
  source 1..20: mol_type = other DNA
tttctcaatgtcaactctca

SEQ ID NO: 88 - DNA, 20 bp, synthetic construct
  source 1..20: mol_type = other DNA
caagccgaatcttgacatac

SEQ ID NO: 89 - DNA, 20 bp, synthetic construct
  source 1..20: mol_type = other DNA
gaccagaaaagctacatagc

SEQ ID NO: 90 - DNA, 20 bp, synthetic construct
  source 1..20: mol_type = other DNA
attttgtatattgtagcttt

SEQ ID NO: 91 - DNA, 20 bp, synthetic construct
  source 1..20: mol_type = other DNA
ccatctttctgttatcttgt

SEQ ID NO: 92 - DNA, 20 bp, synthetic construct
  source 1..20: mol_type = other DNA
ctttgtttctttttaagaaa

SEQ ID NO: 93 - DNA, 20 bp, synthetic construct
  source 1..20: mol_type = other DNA
accttgacaacaccctagct

SEQ ID NO: 94 - DNA, 20 bp, synthetic construct
  source 1..20: mol_type = other DNA
aaaaaggaaccataaactaa

SEQ ID NO: 95 - DNA, 20 bp, synthetic construct
  source 1..20: mol_type = other DNA
ggtgtgtcagctgtgctggt

SEQ ID NO: 96 - DNA, 20 bp, synthetic construct
  source 1..20: mol_type = other DNA
atcataccttcacttttttt

SEQ ID NO: 97 - DNA, 20 bp, synthetic construct
  source 1..20: mol_type = other DNA
ttcattgagcttcctggata

SEQ ID NO: 98 - DNA, 20 bp, synthetic construct
  source 1..20: mol_type = other DNA
ttacttctttttcattaagt

SEQ ID NO: 99 - DNA, 20 bp, synthetic construct
  source 1..20: mol_type = other DNA
agtaaacactccaacaaaaa

SEQ ID NO: 100 - DNA, 20 bp, synthetic construct
  source 1..20: mol_type = other DNA
ggtctaagcaaaatgtgaag

SEQ ID NO: 101 - DNA, 20 bp, synthetic construct
  source 1..20: mol_type = other DNA
cagttaggcctgctccgaat

SEQ ID NO: 102 - DNA, 20 bp, synthetic construct
  source 1..20: mol_type = other DNA
actctgaaaatagccaattt

SEQ ID NO: 103 - DNA, 20 bp, synthetic construct
  source 1..20: mol_type = other DNA
agtatctatctacaattaaa

SEQ ID NO: 104 - DNA, 20 bp, synthetic construct
  source 1..20: mol_type = other DNA
aatggcttagctactcaccc

SEQ ID NO: 105 - DNA, 20 bp, synthetic construct
  source 1..20: mol_type = other DNA
cctctctgcaaaacaagaga

SEQ ID NO: 106 - DNA, 20 bp, synthetic construct
  source 1..20: mol_type = other DNA
attactcattctgggaatgc

SEQ ID NO: 107 - DNA, 20 bp, synthetic construct
  source 1..20: mol_type = other DNA
gttttcagcatgattctaac

SEQ ID NO: 108 - DNA, 20 bp, synthetic construct
  source 1..20: mol_type = other DNA
catatataaaaattagaatg

SEQ ID NO: 109 - DNA, 20 bp, synthetic construct
  source 1..20: mol_type = other DNA
aatgccacaaagctggctgt

SEQ ID NO: 110 - DNA, 20 bp, synthetic construct
  source 1..20: mol_type = other DNA
gtgcacagataatgactaga

SEQ ID NO: 111 - DNA, 20 bp, synthetic construct
  source 1..20: mol_type = other DNA
cagtgagaagtcaattgtca

SEQ ID NO: 112 - DNA, 20 bp, synthetic construct
  source 1..20: mol_type = other DNA
tcctttagcatttctattag

SEQ ID NO: 113 - DNA, 20 bp, synthetic construct
  source 1..20: mol_type = other DNA
aacatgtgcttgcaagccat

SEQ ID NO: 114 - DNA, 20 bp, synthetic construct
  source 1..20: mol_type = other DNA
aaataactggatctcataac

SEQ ID NO: 115 - DNA, 20 bp, synthetic construct
  source 1..20: mol_type = other DNA
cttaggagagaaacactttc

SEQ ID NO: 116 - DNA, 20 bp, synthetic construct
  source 1..20: mol_type = other DNA
tacatcctgtaggctttctt

SEQ ID NO: 117 - DNA, 20 bp, synthetic construct
  source 1..20: mol_type = other DNA
actgagaaatctcttgaatg

SEQ ID NO: 118 - DNA, 20 bp, synthetic construct
  source 1..20: mol_type = other DNA
ttgctctttttactttgttc

SEQ ID NO: 119 - DNA, 20 bp, synthetic construct
  source 1..20: mol_type = other DNA
actctaagttttattaatag

SEQ ID NO: 120 - DNA, 20 bp, synthetic construct
  source 1..20: mol_type = other DNA
tttggaagagcttaataaag

SEQ ID NO: 121 - DNA, 20 bp, synthetic construct
  source 1..20: mol_type = other DNA
tagctagaatttcaactact

SEQ ID NO: 122 - DNA, 20 bp, synthetic construct
  source 1..20: mol_type = other DNA
atgtagtatttatttcattt

SEQ ID NO: 123 - DNA, 20 bp, synthetic construct
  source 1..20: mol_type = other DNA
gcctaatatgtgtcatcctg

SEQ ID NO: 124 - DNA, 20 bp, synthetic construct
  source 1..20: mol_type = other DNA
cctcaattctatggttagtt

SEQ ID NO: 125 - DNA, 20 bp, synthetic construct
  source 1..20: mol_type = other DNA
tcttggagatgacttctctg

SEQ ID NO: 126 - DNA, 20 bp, synthetic construct
  source 1..20: mol_type = other DNA
tcttcaagactaaggtaggg

SEQ ID NO: 127 - DNA, 20 bp, synthetic construct
  source 1..20: mol_type = other DNA
agtaaggtctgttattctcc

SEQ ID NO: 128 - DNA, 20 bp, synthetic construct
  source 1..20: mol_type = other DNA
gctatacaacaaaaagaatt

SEQ ID NO: 129 - DNA, 20 bp, synthetic construct
  source 1..20: mol_type = other DNA
actgtggaaaaactttggca

SEQ ID NO: 130 - DNA, 20 bp, synthetic construct
  source 1..20: mol_type = other DNA
ataatctacatgtatagacc

SEQ ID NO: 131 - DNA, 20 bp, synthetic construct
  source 1..20: mol_type = other DNA
aaaagccaattctgaaattc

SEQ ID NO: 132 - DNA, 20 bp, synthetic construct
  source 1..20: mol_type = other DNA
attctcctacctctcagcct

SEQ ID NO: 133 - DNA, 20 bp, synthetic construct
  source 1..20: mol_type = other DNA
aactgtagcaaatatactac

SEQ ID NO: 134 - DNA, 20 bp, synthetic construct
  source 1..20: mol_type = other DNA
aaattactgctctgtaaaag

SEQ ID NO: 135 - DNA, 20 bp, synthetic construct
  source 1..20: mol_type = other DNA
gattcaatgaaataaaaaat

SEQ ID NO: 136 - DNA, 20 bp, synthetic construct
  source 1..20: mol_type = other DNA
aatgacatagcttatgctgt

SEQ ID NO: 137 - DNA, 20 bp, synthetic construct
  source 1..20: mol_type = other DNA
ctagaaattaagacatccct

SEQ ID NO: 138 - DNA, 20 bp, synthetic construct
  source 1..20: mol_type = other DNA
gccacaccatcaaaagaacc

SEQ ID NO: 139 - DNA, 20 bp, synthetic construct
  source 1..20: mol_type = other DNA
tggaccacctaagacctcaa

SEQ ID NO: 140 - DNA, 20 bp, synthetic construct
  source 1..20: mol_type = other DNA
accggttcccaattttctcc

SEQ ID NO: 141 - DNA, 20 bp, synthetic construct
  source 1..20: mol_type = other DNA
gagagaatacggccctgatg

SEQ ID NO: 142 - DNA, 20 bp, synthetic construct
  source 1..20: mol_type = other DNA
aacttcaatcagagtaatat

SEQ ID NO: 143 - DNA, 20 bp, synthetic construct
  source 1..20: mol_type = other DNA
ggcaaaggaatgaagagacc

SEQ ID NO: 144 - DNA, 20 bp, synthetic construct
  source 1..20: mol_type = other DNA
gccaataacaagaaaagaga

SEQ ID NO: 145 - DNA, 20 bp, synthetic construct
  source 1..20: mol_type = other DNA
atcaaattggatgacctaaa

SEQ ID NO: 146 - DNA, 20 bp, synthetic construct
  source 1..20: mol_type = other DNA
caatggatttcaattacact

SEQ ID NO: 147 - DNA, 20 bp, synthetic construct
  source 1..20: mol_type = other DNA
attctccaacaaaaagacat

SEQ ID NO: 148 - DNA, 20 bp, synthetic construct
  source 1..20: mol_type = other DNA
gtagctacaagaagtaattg

SEQ ID NO: 149 - DNA, 20 bp, synthetic construct
  source 1..20: mol_type = other DNA
aaagaatgcctataagaatt

SEQ ID NO: 150 - DNA, 20 bp, synthetic construct
  source 1..20: mol_type = other DNA
ctactggcatcagtcaaaac

SEQ ID NO: 151 - DNA, 20 bp, synthetic construct
  source 1..20: mol_type = other DNA
aaaaggcaaggctaaggagt

SEQ ID NO: 152 - DNA, 20 bp, synthetic construct
  source 1..20: mol_type = other DNA
cccacacaggtcattcattc

SEQ ID NO: 153 - DNA, 20 bp, synthetic construct
  source 1..20: mol_type = other DNA
tgtatacaccatcccagaaa

SEQ ID NO: 154 - DNA, 20 bp, synthetic construct
  source 1..20: mol_type = other DNA
aaaatgccagtttgttgtac

SEQ ID NO: 155 - DNA, 20 bp, synthetic construct
  source 1..20: mol_type = other DNA
acactgtacaggagggtgtc

SEQ ID NO: 156 - DNA, 20 bp, synthetic construct
  source 1..20: mol_type = other DNA
ttcactgcacactgtacagg

SEQ ID NO: 157 - DNA, 20 bp, synthetic construct
  source 1..20: mol_type = other DNA
aaatgatgttgattcactgc

SEQ ID NO: 158 - DNA, 20 bp, synthetic construct
  source 1..20: mol_type = other DNA
agagttttcatgaattcagg

SEQ ID NO: 159 - DNA, 20 bp, synthetic construct
  source 1..20: mol_type = other DNA
ggtttctttcattaaatagc

SEQ ID NO: 160 - DNA, 20 bp, synthetic construct
  source 1..20: mol_type = other DNA
gaggcaactcctgagagctg

SEQ ID NO: 161 - DNA, 20 bp, synthetic construct
  source 1..20: mol_type = other DNA
ttaaatgtcaggaggtcccc

SEQ ID NO: 162 - DNA, 20 bp, synthetic construct
  source 1..20: mol_type = other DNA
tgtcatctgatctcacacat

SEQ ID NO: 163 - DNA, 20 bp, synthetic construct
  source 1..20: mol_type = other DNA
caaagtccaagggaaatgat

SEQ ID NO: 164 - DNA, 20 bp, synthetic construct
  source 1..20: mol_type = other DNA
cacagtagaggcaaatgaga

SEQ ID NO: 165 - DNA, 20 bp, synthetic construct
  source 1..20: mol_type = other DNA
gacatttaggatgatgatat

SEQ ID NO: 166 - DNA, 20 bp, synthetic construct
  source 1..20: mol_type = other DNA
gttgtattaatggacttttg

SEQ ID NO: 167 - DNA, 20 bp, synthetic construct
  source 1..20: mol_type = other DNA
attttttgcataagtgcatt

SEQ ID NO: 168 - DNA, 20 bp, synthetic construct
  source 1..20: mol_type = other DNA
acatttcttagttgaacagt

SEQ ID NO: 169 - DNA, 20 bp, synthetic construct
  source 1..20: mol_type = other DNA
agattcttccccaatcccat

SEQ ID NO: 170 - DNA, 20 bp, synthetic construct
  source 1..20: mol_type = other DNA
ctcacttgtctccttttacc

SEQ ID NO: 171 - DNA, 20 bp, synthetic construct
  source 1..20: mol_type = other DNA
acaataaggaagagcaaaac

SEQ ID NO: 172 - DNA, 20 bp, synthetic construct
  source 1..20: mol_type = other DNA
atcatgtgcatacccagggt

SEQ ID NO: 173 - DNA, 20 bp, synthetic construct
  source 1..20: mol_type = other DNA
tcactcattttgttcagctt

SEQ ID NO: 174 - DNA, 20 bp, synthetic construct
  source 1..20: mol_type = other DNA
gttttcactcattttgttca

SEQ ID NO: 175 - DNA, 20 bp, synthetic construct
  source 1..20: mol_type = other DNA
acaattattctcatcatcga

SEQ ID NO: 176 - DNA, 20 bp, synthetic construct
  source 1..20: mol_type = other DNA
cctcagcatcctcagacaat

SEQ ID NO: 177 - DNA, 20 bp, synthetic construct
  source 1..20: mol_type = other DNA
tctggaatgagtccctcagc

SEQ ID NO: 178 - DNA, 20 bp, synthetic construct
  source 1..20: mol_type = other DNA
ctcagattgacatctggaat

SEQ ID NO: 179 - DNA, 20 bp, synthetic construct
  source 1..20: mol_type = other DNA
cactcattttgttcagcttt

SEQ ID NO: 180 - DNA, 20 bp, synthetic construct
  source 1..20: mol_type = other DNA
agttttcactcattttgttc

SEQ ID NO: 181 - DNA, 20 bp, synthetic construct
  source 1..20: mol_type = other DNA
gtcatcacctctcttcagga

SEQ ID NO: 182 - DNA, 20 bp, synthetic construct
  source 1..20: mol_type = other DNA
aagtcatcacctctcttcag

SEQ ID NO: 183 - DNA, 20 bp, synthetic construct
  source 1..20: mol_type = other DNA
ttaagtcatcacctctcttc

SEQ ID NO: 184 - DNA, 20 bp, synthetic construct
  source 1..20: mol_type = other DNA
ttttaagtcatcacctctct

SEQ ID NO: 185 - DNA, 20 bp, synthetic construct
  source 1..20: mol_type = other DNA
atttttaagtcatcacctct

SEQ ID NO: 186 - DNA, 20 bp, synthetic construct
  source 1..20: mol_type = other DNA
tgatttttaagtcatcacct

SEQ ID NO: 187 - DNA, 20 bp, synthetic construct
  source 1..20: mol_type = other DNA
catgatttttaagtcatcac

SEQ ID NO: 188 - DNA, 20 bp, synthetic construct
  source 1..20: mol_type = other DNA
agcatgatttttaagtcatc

SEQ ID NO: 189 - DNA, 20 bp, synthetic construct
  source 1..20: mol_type = other DNA
tgagcatgatttttaagtca

SEQ ID NO: 190 - DNA, 20 bp, synthetic construct
  source 1..20: mol_type = other DNA
attgagcatgatttttaagt

SEQ ID NO: 191 - DNA, 20 bp, synthetic construct
  source 1..20: mol_type = other DNA
ctattgagcatgatttttaa

SEQ ID NO: 192 - DNA, 20 bp, synthetic construct
  source 1..20: mol_type = other DNA
tcctattgagcatgattttt

SEQ ID NO: 193 - DNA, 20 bp, synthetic construct
  source 1..20: mol_type = other DNA
aatcctattgagcatgattt

SEQ ID NO: 194 - DNA, 20 bp, synthetic construct
  source 1..20: mol_type = other DNA
gtaatcctattgagcatgat

SEQ ID NO: 195 - DNA, 20 bp, synthetic construct
  source 1..20: mol_type = other DNA
gcgtaatcctattgagcatg

SEQ ID NO: 196 - DNA, 20 bp, synthetic construct
  source 1..20: mol_type = other DNA
cagcgtaatcctattgagca

SEQ ID NO: 197 - DNA, 20 bp, synthetic construct
  source 1..20: mol_type = other DNA
ctcagcgtaatcctattgag

SEQ ID NO: 198 - DNA, 20 bp, synthetic construct
  source 1..20: mol_type = other DNA
gcctcagcgtaatcctattg

SEQ ID NO: 199 - DNA, 20 bp, synthetic construct
  source 1..20: mol_type = other DNA
gggcctcagcgtaatcctat

SEQ ID NO: 200 - DNA, 20 bp, synthetic construct
  source 1..20: mol_type = other DNA
ctgggcctcagcgtaatcct

SEQ ID NO: 201 - DNA, 20 bp, synthetic construct
  source 1..20: mol_type = other DNA
ggctgggcctcagcgtaatc

SEQ ID NO: 202 - DNA, 20 bp, synthetic construct
  source 1..20: mol_type = other DNA
taggctgggcctcagcgtaa

SEQ ID NO: 203 - DNA, 20 bp, synthetic construct
  source 1..20: mol_type = other DNA
cctaggctgggcctcagcgt

SEQ ID NO: 204 - DNA, 20 bp, synthetic construct
  source 1..20: mol_type = other DNA
cacctaggctgggcctcagc

SEQ ID NO: 205 - DNA, 20 bp, synthetic construct
  source 1..20: mol_type = other DNA
ctcacctaggctgggcctca

SEQ ID NO: 206 - DNA, 20 bp, synthetic construct
  source 1..20: mol_type = other DNA
ttctcacctaggctgggcct

SEQ ID NO: 207 - DNA, 20 bp, synthetic construct
  source 1..20: mol_type = other DNA
aattctcacctaggctgggc

SEQ ID NO: 208 - DNA, 20 bp, synthetic construct
  source 1..20: mol_type = other DNA
aaaattctcacctaggctgg

SEQ ID NO: 209 - DNA, 20 bp, synthetic construct
  source 1..20: mol_type = other DNA
ccaaaattctcacctaggct

SEQ ID NO: 210 - DNA, 20 bp, synthetic construct
  source 1..20: mol_type = other DNA
cttccaaaattctcacctag

SEQ ID NO: 211 - DNA, 20 bp, synthetic construct
  source 1..20: mol_type = other DNA
cctcttccaaaattctcacc

SEQ ID NO: 212 - DNA, 20 bp, synthetic construct
  source 1..20: mol_type = other DNA
catcctcttccaaaattctc

SEQ ID NO: 213 - DNA, 20 bp, synthetic construct
  source 1..20: mol_type = other DNA
cagcatcctcttccaaaatt

SEQ ID NO: 214 - DNA, 20 bp, synthetic construct
  source 1..20: mol_type = other DNA
tcccagcatcctcttccaaa

SEQ ID NO: 215 - DNA, 20 bp, synthetic construct
  source 1..20: mol_type = other DNA
ggatcccagcatcctcttcc

SEQ ID NO: 216 - DNA, 20 bp, synthetic construct
  source 1..20: mol_type = other DNA
gccacccacatgccctgccc

SEQ ID NO: 217 - DNA, 20 bp, synthetic construct
  source 1..20: mol_type = other DNA
agagctcactgaaagacaca

SEQ ID NO: 218 - DNA, 20 bp, synthetic construct
  source 1..20: mol_type = other DNA
gaagagctcactgaaagaca

SEQ ID NO: 219 - DNA, 20 bp, synthetic construct
  source 1..20: mol_type = other DNA
gcaggatccactcacctatg

SEQ ID NO: 220 - DNA, 20 bp, synthetic construct
  source 1..20: mol_type = other DNA
cagagctcagccttgaccca

SEQ ID NO: 221 - DNA, 20 bp, synthetic construct
  source 1..20: mol_type = other DNA
agctcagtgcaggagaccag

SEQ ID NO: 222 - DNA, 20 bp, synthetic construct
  source 1..20: mol_type = other DNA
ccacagctcagtgcaggaga

SEQ ID NO: 223 - DNA, 20 bp, synthetic construct
  source 1..20: mol_type = other DNA
gatgtgctcaccacagctca

SEQ ID NO: 224 - DNA, 20 bp, synthetic construct
  source 1..20: mol_type = other DNA
ggaaccctttcctgcctgga

SEQ ID NO: 225 - DNA, 20 bp, synthetic construct
  source 1..20: mol_type = other DNA
caatataaggttctcatcat

SEQ ID NO: 226 - DNA, 20 bp, synthetic construct
  source 1..20: mol_type = other DNA
tcaggacaatataaggttct

SEQ ID NO: 227 - DNA, 20 bp, synthetic construct
  source 1..20: mol_type = other DNA
catcacctctcttcaggaca

SEQ ID NO: 228 - DNA, 20 bp, synthetic construct
  source 1..20: mol_type = other DNA
tctcacctaggctaggcctc

SEQ ID NO: 229 - DNA, 20 bp, synthetic construct
  source 1..20: mol_type = other DNA
agctcactgaaagacacaag

SEQ ID NO: 230 - DNA, 20 bp, synthetic construct
  source 1..20: mol_type = other DNA
aggaagggcctgagcttcag

SEQ ID NO: 231 - DNA, 20 bp, synthetic construct
  source 1..20: mol_type = other DNA
ctcaccacacctcagtgcag

SEQ ID NO: 232 - DNA, 20 bp, synthetic construct
  source 1..20: mol_type = other DNA
ctttcctgcctggaccacca

SEQ ID NO: 233 - DNA, 20 bp, synthetic construct
  source 1..20: mol_type = other DNA
ttgggcaccctccagatgcc

SEQ ID NO: 234 - DNA, 20 bp, synthetic construct
  source 1..20: mol_type = other DNA
cactcacctatgctggtcaa

SEQ ID NO: 235 - DNA, 20 bp, synthetic construct
  source 1..20: mol_type = other DNA
tcagctgggtgctgccctgc

SEQ ID NO: 236 - DNA, 20 bp, synthetic construct
  source 1..20: mol_type = other DNA
ccattcagggccatgggttt

SEQ ID NO: 237 - DNA, 20 bp, synthetic construct
  source 1..20: mol_type = other DNA
tccctgcacatgcatccagc

SEQ ID NO: 238 - DNA, 20 bp, synthetic construct
  source 1..20: mol_type = other DNA
actccagggaccaagagctc

SEQ ID NO: 239 - DNA, 20 bp, synthetic construct
  source 1..20: mol_type = other DNA
gagacccactgagatggccc

SEQ ID NO: 240 - DNA, 20 bp, synthetic construct
  source 1..20: mol_type = other DNA
accccatgaccctggaggtg

SEQ ID NO: 241 - DNA, 20 bp, synthetic construct
  source 1..20: mol_type = other DNA
atgaccccagcaggatgcac

SEQ ID NO: 242 - DNA, 20 bp, synthetic construct
  source 1..20: mol_type = other DNA
tcacccaccactgtccagag

SEQ ID NO: 243 - DNA, 20 bp, synthetic construct
  source 1..20: mol_type = other DNA
gtaccactgagatggcccat

SEQ ID NO: 244 - DNA, 20 bp, synthetic construct
  source 1..20: mol_type = other DNA
aatgcagacctggcagtcgc

SEQ ID NO: 245 - DNA, 20 bp, synthetic construct
  source 1..20: mol_type = other DNA
cttcaactaacagtatctta

SEQ ID NO: 246 - DNA, 20 bp, synthetic construct
  source 1..20: mol_type = other DNA
agtcttcaactaacagtatc

SEQ ID NO: 247 - DNA, 20 bp, synthetic construct
  source 1..20: mol_type = other DNA
ctatttcattaagtcacccc

SEQ ID NO: 248 - DNA, 20 bp, synthetic construct
  source 1..20: mol_type = other DNA
ggacagctgtgtggagggat

SEQ ID NO: 249 - DNA, 20 bp, synthetic construct
  source 1..20: mol_type = other DNA
accaccagggagaccagcct

SEQ ID NO: 250 - DNA, 20 bp, synthetic construct
  source 1..20: mol_type = other DNA
cagcctttctaccaccaggg

SEQ ID NO: 251 - DNA, 20 bp, synthetic construct
  source 1..20: mol_type = other DNA
tcagcctttctaccaccagg

SEQ ID NO: 252 - DNA, 20 bp, synthetic construct
  source 1..20: mol_type = other DNA
acagagtgtttactgtgagc

SEQ ID NO: 253 - DNA, 20 bp, synthetic construct
  source 1..20: mol_type = other DNA
tccatggaatggctgtcatg

SEQ ID NO: 254 - DNA, 20 bp, synthetic construct
  source 1..20: mol_type = other DNA
ttccttcagagttatttctt

SEQ ID NO: 255 - DNA, 20 bp, synthetic construct
  source 1..20: mol_type = other DNA
ttattctccttccttcagag

SEQ ID NO: 256 - DNA, 20 bp, synthetic construct
  source 1..20: mol_type = other DNA
gttattctccttccttcaga

SEQ ID NO: 257 - DNA, 20 bp, synthetic construct
  source 1..20: mol_type = other DNA
gaagtagtcctgccctttcc

SEQ ID NO: 258 - DNA, 20 bp, synthetic construct
  source 1..20: mol_type = other DNA
atatcctttcctctcctact

SEQ ID NO: 259 - DNA, 20 bp, synthetic construct
  source 1..20: mol_type = other DNA
gactgatggttacccataca

SEQ ID NO: 260 - DNA, 20 bp, synthetic construct
  source 1..20: mol_type = other DNA
catttaacaactattatctt

SEQ ID NO: 261 - DNA, 20 bp, synthetic construct
  source 1..20: mol_type = other DNA
tcattaaatagctaaccatt

SEQ ID NO: 262 - DNA, 20 bp, synthetic construct
  source 1..20: mol_type = other DNA
ccactttgcaactcaagatt

SEQ ID NO: 263 - DNA, 20 bp, synthetic construct
  source 1..20: mol_type = other DNA
cagccactttgcaactcaag

SEQ ID NO: 264 - DNA, 20 bp, synthetic construct
  source 1..20: mol_type = other DNA
gactccagccactttgcaac

SEQ ID NO: 265 - DNA, 20 bp, synthetic construct
  source 1..20: mol_type = other DNA
ccagaaatttagtctgttgt

SEQ ID NO: 266 - DNA, 20 bp, synthetic construct
  source 1..20: mol_type = other DNA
cataagctgctggatttgtt

SEQ ID NO: 267 - DNA, 20 bp, synthetic construct
  source 1..20: mol_type = other DNA
gaagagaacgaggatataaa

SEQ ID NO: 268 - DNA, 20 bp, synthetic construct
  source 1..20: mol_type = other DNA
gtgatatattagaactgtat

SEQ ID NO: 269 - DNA, 20 bp, synthetic construct
  source 1..20: mol_type = other DNA
agaggatttagagttaaaat

SEQ ID NO: 270 - DNA, 20 bp, synthetic construct
  source 1..20: mol_type = other DNA
actgaaaggtctgtatgttt

SEQ ID NO: 271 - DNA, 20 bp, synthetic construct
  source 1..20: mol_type = other DNA
caggcctagcttccacctaa

SEQ ID NO: 272 - DNA, 20 bp, synthetic construct
  source 1..20: mol_type = other DNA
tctgtcaaagacctgtgagg

SEQ ID NO: 273 - DNA, 20 bp, synthetic construct
  source 1..20: mol_type = other DNA
tctgcttgtggttcttccct

SEQ ID NO: 274 - DNA, 20 bp, synthetic construct
  source 1..20: mol_type = other DNA
caaatatggaatagcacttg

SEQ ID NO: 275 - DNA, 20 bp, synthetic construct
  source 1..20: mol_type = other DNA
gttgagaacggtattgagta

SEQ ID NO: 276 - DNA, 20 bp, synthetic construct
  source 1..20: mol_type = other DNA
ctcttgttttcagttgagaa

SEQ ID NO: 277 - DNA, 20 bp, synthetic construct
  source 1..20: mol_type = other DNA
atttctccatggactccaga

SEQ ID NO: 278 - DNA, 20 bp, synthetic construct
  source 1..20: mol_type = other DNA
cattggcttcatatttctcc

SEQ ID NO: 279 - DNA, 20 bp, synthetic construct
  source 1..20: mol_type = other DNA
tattgccttcactgctgcct

SEQ ID NO: 280 - DNA, 20 bp, synthetic construct
  source 1..20: mol_type = other DNA
actgacttgctctgcctact

SEQ ID NO: 281 - DNA, 20 bp, synthetic construct
  source 1..20: mol_type = other DNA
gagaagtctctcatggcacc

SEQ ID NO: 282 - DNA, 20 bp, synthetic construct
  source 1..20: mol_type = other DNA
ggagtgctccacacttctgt

SEQ ID NO: 283 - DNA, 20 bp, synthetic construct
  source 1..20: mol_type = other DNA
ctccaggttgtggaggttgt

SEQ ID NO: 284 - DNA, 20 bp, synthetic construct
  source 1..20: mol_type = other DNA
gtatatactccaggttgtgg

SEQ ID NO: 285 - DNA, 20 bp, synthetic construct
  source 1..20: mol_type = other DNA
acttctcattctctccacca

SEQ ID NO: 286 - DNA, 20 bp, synthetic construct
  source 1..20: mol_type = other DNA
aaagcattttctaccagagc

SEQ ID NO: 287 - DNA, 20 bp, synthetic construct
  source 1..20: mol_type = other DNA
tagacaaggaaagcattttc

SEQ ID NO: 288 - DNA, 20 bp, synthetic construct
  source 1..20: mol_type = other DNA
cacctgccctgcttttgctt

SEQ ID NO: 289 - DNA, 20 bp, synthetic construct
  source 1..20: mol_type = other DNA
tggtcctagcttcacctgcc

SEQ ID NO: 290 - DNA, 20 bp, synthetic construct
  source 1..20: mol_type = other DNA
agatccaacctgtgtggaaa

SEQ ID NO: 291 - DNA, 20 bp, synthetic construct
  source 1..20: mol_type = other DNA
agaaattagagccaggttcc

SEQ ID NO: 292 - DNA, 20 bp, synthetic construct
  source 1..20: mol_type = other DNA
tccccccagaaggcttgact

SEQ ID NO: 293 - DNA, 20 bp, synthetic construct
  source 1..20: mol_type = other DNA
tcgctggccatttcatatat

SEQ ID NO: 294 - DNA, 20 bp, synthetic construct
  source 1..20: mol_type = other DNA
aaaacatgttaactgttatc

SEQ ID NO: 295 - DNA, 20 bp, synthetic construct
  source 1..20: mol_type = other DNA
ttagccatgtgctttgtgac

SEQ ID NO: 296 - DNA, 20 bp, synthetic construct
  source 1..20: mol_type = other DNA
tcccttctgtcatctgatct

SEQ ID NO: 297 - DNA, 20 bp, synthetic construct
  source 1..20: mol_type = other DNA
aaggtagttctcccttctgt

SEQ ID NO: 298 - DNA, 20 bp, synthetic construct
  source 1..20: mol_type = other DNA
ttccattgcactcctttcta

SEQ ID NO: 299 - DNA, 20 bp, synthetic construct
  source 1..20: mol_type = other DNA
taaaaggaaaacccacttgt

SEQ ID NO: 300 - DNA, 20 bp, synthetic construct
  source 1..20: mol_type = other DNA
tacagaaattaccagtaaag

SEQ ID NO: 301 - DNA, 20 bp, synthetic construct
  source 1..20: mol_type = other DNA
tccagatttctacagaaatt

SEQ ID NO: 302 - DNA, 20 bp, synthetic construct
  source 1..20: mol_type = other DNA
tcactgcacactgtacagga

SEQ ID NO: 303 - DNA, 20 bp, synthetic construct
  source 1..20: mol_type = other DNA
tgcctagttccctcctgaaa

SEQ ID NO: 304 - DNA, 20 bp, synthetic construct
  source 1..20: mol_type = other DNA
ttatgtttacttcatgactg

SEQ ID NO: 305 - DNA, 20 bp, synthetic construct
  source 1..20: mol_type = other DNA
cttcattattctctagtgcc

SEQ ID NO: 306 - DNA, 20 bp, synthetic construct
  source 1..20: mol_type = other DNA
ctattccccttcaacatgtg

SEQ ID NO: 307 - DNA, 20 bp, synthetic construct
  source 1..20: mol_type = other DNA
catacccaacatgcttgcat

SEQ ID NO: 308 - DNA, 20 bp, synthetic construct
  source 1..20: mol_type = other DNA
aatgcattaccctacaatgc

SEQ ID NO: 309 - DNA, 20 bp, synthetic construct
  source 1..20: mol_type = other DNA
ctcatcacaactgggtggta

SEQ ID NO: 310 - DNA, 20 bp, synthetic construct
  source 1..20: mol_type = other DNA
atcccagctcatcacaactg

SEQ ID NO: 311 - DNA, 20 bp, synthetic construct
  source 1..20: mol_type = other DNA
tccaagtgcttcaagctgag

SEQ ID NO: 312 - DNA, 20 bp, synthetic construct
  source 1..20: mol_type = other DNA
cacccacagcaggcagataa

SEQ ID NO: 313 - DNA, 20 bp, synthetic construct
  source 1..20: mol_type = other DNA
taccttgctccaaaataatc

SEQ ID NO: 314 - DNA, 20 bp, synthetic construct
  source 1..20: mol_type = other DNA
ctgtttcttgaggcaaatga

SEQ ID NO: 315 - DNA, 20 bp, synthetic construct
  source 1..20: mol_type = other DNA
cttttctcaatgtcaactct

SEQ ID NO: 316 - DNA, 20 bp, synthetic construct
  source 1..20: mol_type = other DNA
agagttatacacggaaccca

SEQ ID NO: 317 - DNA, 20 bp, synthetic construct
  source 1..20: mol_type = other DNA
ttctagggctccagtttatg

SEQ ID NO: 318 - DNA, 20 bp, synthetic construct
  source 1..20: mol_type = other DNA
tggtcatctcgggtatataa

SEQ ID NO: 319 - DNA, 20 bp, synthetic construct
  source 1..20: mol_type = other DNA
cttactatcttcaagaattc

SEQ ID NO: 320 - DNA, 20 bp, synthetic construct
  source 1..20: mol_type = other DNA
tttttcttactatcttcaag

SEQ ID NO: 321 - DNA, 20 bp, synthetic construct
  source 1..20: mol_type = other DNA
agtcaattgtcagacttatt

SEQ ID NO: 322 - DNA, 20 bp, synthetic construct
  source 1..20: mol_type = other DNA
aaggagttcctttagcattt

SEQ ID NO: 323 - DNA, 20 bp, synthetic construct
  source 1..20: mol_type = other DNA
cagaccgaaggagttccttt

SEQ ID NO: 324 - DNA, 20 bp, synthetic construct
  source 1..20: mol_type = other DNA
tccagtgcctttctatttca

SEQ ID NO: 325 - DNA, 20 bp, synthetic construct
  source 1..20: mol_type = other DNA
actttgttttaaacttacac

SEQ ID NO: 326 - DNA, 20 bp, synthetic construct
  source 1..20: mol_type = other DNA
catcaacacaagtttataat

SEQ ID NO: 327 - DNA, 20 bp, synthetic construct
  source 1..20: mol_type = other DNA
aactcccacaaggtactctt

SEQ ID NO: 328 - DNA, 20 bp, synthetic construct
  source 1..20: mol_type = other DNA
actgtcaactcctgaactcc

SEQ ID NO: 329 - DNA, 20 bp, synthetic construct
  source 1..20: mol_type = other DNA
caatgaatctattcttagat

SEQ ID NO: 330 - DNA, 20 bp, synthetic construct
  source 1..20: mol_type = other DNA
gtgaaactgtttataccctt

SEQ ID NO: 331 - DNA, 20 bp, synthetic construct
  source 1..20: mol_type = other DNA
gttggtgatgcaggtaaagt

SEQ ID NO: 332 - DNA, 20 bp, synthetic construct
  source 1..20: mol_type = other DNA
ttgttactgagctgtgccac

SEQ ID NO: 333 - DNA, 20 bp, synthetic construct
  source 1..20: mol_type = other DNA
aagtggatctcttgggcagg

SEQ ID NO: 334 - DNA, 20 bp, synthetic construct
  source 1..20: mol_type = other DNA
tttaccctctcccaaccact

SEQ ID NO: 335 - DNA, 20 bp, synthetic construct
  source 1..20: mol_type = other DNA
ggctgctgtttgagtcccca

SEQ ID NO: 336 - DNA, 20 bp, synthetic construct
  source 1..20: mol_type = other DNA
atgggctgctgtttgagtcc

SEQ ID NO: 337 - DNA, 20 bp, synthetic construct
  source 1..20: mol_type = other DNA
tatgggctgctgtttgagtc

SEQ ID NO: 338 - DNA, 20 bp, synthetic construct
  source 1..20: mol_type = other DNA
aaagccaggccaggtgctga

SEQ ID NO: 339 - DNA, 20 bp, synthetic construct
  source 1..20: mol_type = other DNA
cataaagccaggccaggtgc

SEQ ID NO: 340 - DNA, 20 bp, synthetic construct
  source 1..20: mol_type = other DNA
tgcataaagccaggccaggt

SEQ ID NO: 341 - DNA, 20 bp, synthetic construct
  source 1..20: mol_type = other DNA
ggttgcataaagccaggcca

SEQ ID NO: 342 - DNA, 20 bp, synthetic construct
  source 1..20: mol_type = other DNA
tctaggttgcataaagccag

SEQ ID NO: 343 - DNA, 20 bp, synthetic construct
  source 1..20: mol_type = other DNA
ttctctaggttgcataaagc

SEQ ID NO: 344 - DNA, 20 bp, synthetic construct
  source 1..20: mol_type = other DNA
ccttctctaggttgcataaa

SEQ ID NO: 345 - DNA, 20 bp, synthetic construct
  source 1..20: mol_type = other DNA
tcaccttctctaggttgcat

SEQ ID NO: 346 - DNA, 20 bp, synthetic construct
  source 1..20: mol_type = other DNA
tatcaccttctctaggttgc

SEQ ID NO: 347 - DNA, 20 bp, synthetic construct
  source 1..20: mol_type = other DNA
cacatcttgttccctcaagg

SEQ ID NO: 348 - DNA, 20 bp, synthetic construct
  source 1..20: mol_type = other DNA
ttcacacatcttgttccctc

SEQ ID NO: 349 - DNA, 20 bp, synthetic construct
  source 1..20: mol_type = other DNA
tgcttcacacatcttgttcc

SEQ ID NO: 350 - DNA, 20 bp, synthetic construct
  source 1..20: mol_type = other DNA
cctgcttcacacatcttgtt

SEQ ID NO: 351 - DNA, 20 bp, synthetic construct
  source 1..20: mol_type = other DNA
gaacctgcttcacacatctt

SEQ ID NO: 352 - DNA, 20 bp, synthetic construct
  source 1..20: mol_type = other DNA
ctttcatcagttagtcaggt

SEQ ID NO: 353 - DNA, 20 bp, synthetic construct
  source 1..20: mol_type = other DNA
ggagttggttattggaaaat

SEQ ID NO: 354 - DNA, 20 bp, synthetic construct
  source 1..20: mol_type = other DNA
tctattggtgttccttttag

SEQ ID NO: 355 - DNA, 20 bp, synthetic construct
  source 1..20: mol_type = other DNA
agagtagtctattggtgttc

SEQ ID NO: 356 - DNA, 20 bp, synthetic construct
  source 1..20: mol_type = other DNA
cttttaagataatttttctc

SEQ ID NO: 357 - DNA, 20 bp, synthetic construct
  source 1..20: mol_type = other DNA
tacgctccttcatttcatgc

SEQ ID NO: 358 - DNA, 20 bp, synthetic construct
  source 1..20: mol_type = other DNA
tttttaatcctctgatgaat

SEQ ID NO: 359 - DNA, 20 bp, synthetic construct
  source 1..20: mol_type = other DNA
ctctcttctcctttatgact

SEQ ID NO: 360 - DNA, 20 bp, synthetic construct
  source 1..20: mol_type = other DNA
cttaaataagttttctaccc

SEQ ID NO: 361 - DNA, 20 bp, synthetic construct
  source 1..20: mol_type = other DNA
agccattatttcttaaataa

SEQ ID NO: 362 - DNA, 20 bp, synthetic construct
  source 1..20: mol_type = other DNA
catatcttttcctagatttg

SEQ ID NO: 363 - DNA, 20 bp, synthetic construct
  source 1..20: mol_type = other DNA
agaatcctgtctccctctta

SEQ ID NO: 364 - DNA, 20 bp, synthetic construct
  source 1..20: mol_type = other DNA
tgagtctcttttctttcggt

SEQ ID NO: 365 - DNA, 20 bp, synthetic construct
  source 1..20: mol_type = other DNA
tgatgagtctcttttctttc

SEQ ID NO: 366 - DNA, 20 bp, synthetic construct
  source 1..20: mol_type = other DNA
tgtgatgagtctcttttctt

SEQ ID NO: 367 - DNA, 20 bp, synthetic construct
  source 1..20: mol_type = other DNA
tactgagaaatctcttgaat

SEQ ID NO: 368 - DNA, 20 bp, synthetic construct
  source 1..20: mol_type = other DNA
taaaattatttatacaccat

SEQ ID NO: 369 - DNA, 20 bp, synthetic construct
  source 1..20: mol_type = other DNA
tttatactgtagtatgcatt

SEQ ID NO: 370 - DNA, 20 bp, synthetic construct
  source 1..20: mol_type = other DNA
ttacttccctacccttgcat

SEQ ID NO: 371 - DNA, 20 bp, synthetic construct
  source 1..20: mol_type = other DNA
cttttacttccctacccttg

SEQ ID NO: 372 - DNA, 20 bp, synthetic construct
  source 1..20: mol_type = other DNA
atttattttaagctgataac

SEQ ID NO: 373 - DNA, 20 bp, synthetic construct
  source 1..20: mol_type = other DNA
aaatccatttgtccagtctg

SEQ ID NO: 374 - DNA, 20 bp, synthetic construct
  source 1..20: mol_type = other DNA
tatctgcatgcaatatcttt

SEQ ID NO: 375 - DNA, 20 bp, synthetic construct
  source 1..20: mol_type = other DNA
ctgtaagtatagatgcctct

SEQ ID NO: 376 - DNA, 20 bp, synthetic construct
  source 1..20: mol_type = other DNA
ttagccttttgatatagttt

SEQ ID NO: 377 - DNA, 20 bp, synthetic construct
  source 1..20: mol_type = other DNA
gcttcaccattttgaccttc

SEQ ID NO: 378 - DNA, 20 bp, synthetic construct
  source 1..20: mol_type = other DNA
ttttgaaagggaggcactga

SEQ ID NO: 379 - DNA, 20 bp, synthetic construct
  source 1..20: mol_type = other DNA
tgaggtgtaatgttgtttat

SEQ ID NO: 380 - DNA, 20 bp, synthetic construct
  source 1..20: mol_type = other DNA
taatagtctctattgttttt

SEQ ID NO: 381 - DNA, 20 bp, synthetic construct
  source 1..20: mol_type = other DNA
caagttaactaatatgttgg

SEQ ID NO: 382 - DNA, 20 bp, synthetic construct
  source 1..20: mol_type = other DNA
tattgattcaattcccttat

SEQ ID NO: 383 - DNA, 20 bp, synthetic construct
  source 1..20: mol_type = other DNA
gaatattgattcaattccct

SEQ ID NO: 384 - DNA, 20 bp, synthetic construct
  source 1..20: mol_type = other DNA
aatttttttaaatggttggc

SEQ ID NO: 385 - DNA, 20 bp, synthetic construct
  source 1..20: mol_type = other DNA
aacagagaattgtatatcca

SEQ ID NO: 386 - DNA, 20 bp, synthetic construct
  source 1..20: mol_type = other DNA
acatgagatctttaataaga

SEQ ID NO: 387 - DNA, 20 bp, synthetic construct
  source 1..20: mol_type = other DNA
caagagagaagccactcatg

SEQ ID NO: 388 - DNA, 20 bp, synthetic construct
  source 1..20: mol_type = other DNA
agcagatttgagctggaaga

SEQ ID NO: 389 - DNA, 20 bp, synthetic construct
  source 1..20: mol_type = other DNA
aactggcagaaaatatctct

SEQ ID NO: 390 - DNA, 20 bp, synthetic construct
  source 1..20: mol_type = other DNA
aaagaagaacataaactggc

SEQ ID NO: 391 - DNA, 20 bp, synthetic construct
  source 1..20: mol_type = other DNA
gttggctctattttcaaatg

SEQ ID NO: 392 - DNA, 20 bp, synthetic construct
  source 1..20: mol_type = other DNA
ctgtttaggctggacactgt

SEQ ID NO: 393 - DNA, 20 bp, synthetic construct
  source 1..20: mol_type = other DNA
attcaggaaattaaagcatt

SEQ ID NO: 394 - DNA, 20 bp, synthetic construct
  source 1..20: mol_type = other DNA
agcagaacagaccttatttg

SEQ ID NO: 395 - DNA, 20 bp, synthetic construct
  source 1..20: mol_type = other DNA
ccttcaaccagaggagcaga

SEQ ID NO: 396 - DNA, 20 bp, synthetic construct
  source 1..20: mol_type = other DNA
gatcttggtttgtagaaggt

SEQ ID NO: 397 - DNA, 20 bp, synthetic construct
  source 1..20: mol_type = other DNA
ttcaaaatggtagaaaattg

SEQ ID NO: 398 - DNA, 20 bp, synthetic construct
  source 1..20: mol_type = other DNA
tgaaaggcctacagcaacca

SEQ ID NO: 399 - DNA, 20 bp, synthetic construct
  source 1..20: mol_type = other DNA
atgggagctctggaaaacag

SEQ ID NO: 400 - DNA, 20 bp, synthetic construct
  source 1..20: mol_type = other DNA
ttctgagtatatgtgaaaca

SEQ ID NO: 401 - DNA, 20 bp, synthetic construct
  source 1..20: mol_type = other DNA
ataaggagattaatttaaga

SEQ ID NO: 402 - DNA, 20 bp, synthetic construct
  source 1..20: mol_type = other DNA
gaatcaaagaaagaaggaat

SEQ ID NO: 403 - DNA, 20 bp, synthetic construct
  source 1..20: mol_type = other DNA
gctgtaataataatcatatt

SEQ ID NO: 404 - DNA, 20 bp, synthetic construct
  source 1..20: mol_type = other DNA
agaattcttccctacaggtt

SEQ ID NO: 405 - DNA, 20 bp, synthetic construct
  source 1..20: mol_type = other DNA
cagtaattaatgttcttata

SEQ ID NO: 406 - DNA, 20 bp, synthetic construct
  source 1..20: mol_type = other DNA
ccccaattcagtaattaatg

SEQ ID NO: 407 - DNA, 20 bp, synthetic construct
  source 1..20: mol_type = other DNA
ggccccaattcagtaattaa

SEQ ID NO: 408 - DNA, 20 bp, synthetic construct
  source 1..20: mol_type = other DNA
atgtaacctattcaagatga

SEQ ID NO: 409 - DNA, 20 bp, synthetic construct
  source 1..20: mol_type = other DNA
ttatttggaagaagaatctt

SEQ ID NO: 410 - DNA, 20 bp, synthetic construct
  source 1..20: mol_type = other DNA
tataaaatactttttatggg

SEQ ID NO: 411 - DNA, 20 bp, synthetic construct
  source 1..20: mol_type = other DNA
gactgtgataaagatgtata

SEQ ID NO: 412 - DNA, 20 bp, synthetic construct
  source 1..20: mol_type = other DNA
taagggtcatgtactataca

SEQ ID NO: 413 - DNA, 20 bp, synthetic construct
  source 1..20: mol_type = other DNA
gtgtgtgcaatagcctaaat

SEQ ID NO: 414 - DNA, 20 bp, synthetic construct
  source 1..20: mol_type = other DNA
cagaagcaaaagatagcagc

SEQ ID NO: 415 - DNA, 20 bp, synthetic construct
  source 1..20: mol_type = other DNA
tattaatgtacttgaagatg

SEQ ID NO: 416 - DNA, 20 bp, synthetic construct
  source 1..20: mol_type = other DNA
atcagtgtgtgcagattctg

SEQ ID NO: 417 - DNA, 20 bp, synthetic construct
  source 1..20: mol_type = other DNA
tcccatcatcagtgtgtgca

SEQ ID NO: 418 - DNA, 20 bp, synthetic construct
  source 1..20: mol_type = other DNA
tatgaaaattaatgttcaag

SEQ ID NO: 419 - DNA, 20 bp, synthetic construct
  source 1..20: mol_type = other DNA
aaaaaattttaaacccctag

SEQ ID NO: 420 - DNA, 20 bp, synthetic construct
  source 1..20: mol_type = other DNA
tcatgaaagtagagagtaag

SEQ ID NO: 421 - DNA, 20 bp, synthetic construct
  source 1..20: mol_type = other DNA
tgaaacaatttaagtgccca

SEQ ID NO: 422 - DNA, 20 bp, synthetic construct
  source 1..20: mol_type = other DNA
ttgaagggatatcttcattc

SEQ ID NO: 423 - DNA, 20 bp, synthetic construct
  source 1..20: mol_type = other DNA
tctgaaaaaaatagaacaac

SEQ ID NO: 424 - DNA, 20 bp, synthetic construct
  source 1..20: mol_type = other DNA
aataaaagacctgcacagca

SEQ ID NO: 425 - DNA, 20 bp, synthetic construct
  source 1..20: mol_type = other DNA
caaaataaaagacctgcaca

SEQ ID NO: 426 - DNA, 20 bp, synthetic construct
  source 1..20: mol_type = other DNA
agacccttatttacaccata

SEQ ID NO: 427 - DNA, 20 bp, synthetic construct
  source 1..20: mol_type = other DNA
ctattaatgagctatctgaa

SEQ ID NO: 428 - DNA, 20 bp, synthetic construct
  source 1..20: mol_type = other DNA
tctactattaatgagctatc

SEQ ID NO: 429 - DNA, 20 bp, synthetic construct
  source 1..20: mol_type = other DNA
tttccatctactattaatga

SEQ ID NO: 430 - DNA, 20 bp, synthetic construct
  source 1..20: mol_type = other DNA
gtctccaccagaacaaaact

SEQ ID NO: 431 - DNA, 20 bp, synthetic construct
  source 1..20: mol_type = other DNA
atgacataaccatatacaaa

SEQ ID NO: 432 - DNA, 20 bp, synthetic construct
  source 1..20: mol_type = other DNA
ttactgatgacataaccata

SEQ ID NO: 433 - DNA, 20 bp, synthetic construct
  source 1..20: mol_type = other DNA
caaaattcaacctggtttca

SEQ ID NO: 434 - DNA, 20 bp, synthetic construct
  source 1..20: mol_type = other DNA
atggagggtgtaaatcaaat

SEQ ID NO: 435 - DNA, 20 bp, synthetic construct
  source 1..20: mol_type = other DNA
tgttacactgttattaaagc

SEQ ID NO: 436 - DNA, 20 bp, synthetic construct
  source 1..20: mol_type = other DNA
aaaacaatgaagcagaggga

SEQ ID NO: 437 - DNA, 20 bp, synthetic construct
  source 1..20: mol_type = other DNA
taataaaaagtatcccacca

SEQ ID NO: 438 - DNA, 20 bp, synthetic construct
  source 1..20: mol_type = other DNA
gaagttatgcaccatcaaat

SEQ ID NO: 439 - DNA, 20 bp, synthetic construct
  source 1..20: mol_type = other DNA
tttactactgatatcaccaa

SEQ ID NO: 440 - DNA, 20 bp, synthetic construct
  source 1..20: mol_type = other DNA
agaacagactaagcccgaaa

SEQ ID NO: 441 - DNA, 20 bp, synthetic construct
  source 1..20: mol_type = other DNA
aattctggtggaaaatacag

SEQ ID NO: 442 - DNA, 20 bp, synthetic construct
  source 1..20: mol_type = other DNA
acagaaatcatatcaaatcc

SEQ ID NO: 443 - DNA, 20 bp, synthetic construct
  source 1..20: mol_type = other DNA
atatatgaaacattccatcc

SEQ ID NO: 444 - DNA, 20 bp, synthetic construct
  source 1..20: mol_type = other DNA
ttacactttagaccaaacgg

SEQ ID NO: 445 - DNA, 20 bp, synthetic construct
  source 1..20: mol_type = other DNA
gggcagattgatcacctaga

SEQ ID NO: 446 - DNA, 20 bp, synthetic construct
  source 1..20: mol_type = other DNA
cgggacctcaatactctact

SEQ ID NO: 447 - DNA, 20 bp, synthetic construct
  source 1..20: mol_type = other DNA
taaatggaaattgagagcag

SEQ ID NO: 448 - DNA, 20 bp, synthetic construct
  source 1..20: mol_type = other DNA
aagtcacaaccacatactgc

SEQ ID NO: 449 - DNA, 20 bp, synthetic construct
  source 1..20: mol_type = other DNA
gattctccaacaaaaagaca

SEQ ID NO: 450 - DNA, 20 bp, synthetic construct
  source 1..20: mol_type = other DNA
gacactagcagtttcttacc

SEQ ID NO: 451 - DNA, 20 bp, synthetic construct
  source 1..20: mol_type = other DNA
gcttaaagtagcctaaggat

SEQ ID NO: 452 - DNA, 20 bp, synthetic construct
  source 1..20: mol_type = other DNA
acaataagttgtagctacaa

SEQ ID NO: 453 - DNA, 20 bp, synthetic construct
  source 1..20: mol_type = other DNA
ttaaaaacaactgtagctac

SEQ ID NO: 454 - DNA, 20 bp, synthetic construct
  source 1..20: mol_type = other DNA
ttcctattaggaggtttaaa

SEQ ID NO: 455 - DNA, 20 bp, synthetic construct
  source 1..20: mol_type = other DNA
ataagtaattcatagtcaga

SEQ ID NO: 456 - DNA, 20 bp, synthetic construct
  source 1..20: mol_type = other DNA
ggcttaaataaaagactgct

SEQ ID NO: 457 - DNA, 20 bp, synthetic construct
  source 1..20: mol_type = other DNA
taagattccattgccagaat

SEQ ID NO: 458 - DNA, 20 bp, synthetic construct
  source 1..20: mol_type = other DNA
aagtttcgcaataagattcc

SEQ ID NO: 459 - DNA, 20 bp, synthetic construct
  source 1..20: mol_type = other DNA
tttcagtcagcaaaggcagc

SEQ ID NO: 460 - DNA, 20 bp, synthetic construct
  source 1..20: mol_type = other DNA
tctcaaccctgaaaacaatc

SEQ ID NO: 461 - DNA, 20 bp, synthetic construct
  source 1..20: mol_type = other DNA
cattggcattattcacagca

SEQ ID NO: 462 - DNA, 20 bp, synthetic construct
  source 1..20: mol_type = other DNA
ctgactgtcattcatataag

SEQ ID NO: 463 - DNA, 20 bp, synthetic construct
  source 1..20: mol_type = other DNA
tgcataacgataatcatgtg

SEQ ID NO: 464 - DNA, 20 bp, synthetic construct
  source 1..20: mol_type = other DNA
ttgtagatcctggcaagtat

SEQ ID NO: 465 - DNA, 20 bp, synthetic construct
  source 1..20: mol_type = other DNA
aaaaataaagtttccctctt

SEQ ID NO: 466 - DNA, 20 bp, synthetic construct
  source 1..20: mol_type = other DNA
caaaacttgtcaacattata

SEQ ID NO: 467 - DNA, 20 bp, synthetic construct
  source 1..20: mol_type = other DNA
ctatatttagaccaaatgag

SEQ ID NO: 468 - DNA, 20 bp, synthetic construct
  source 1..20: mol_type = other DNA
ctgacatatataaattagaa

SEQ ID NO: 469 - DNA, 20 bp, synthetic construct
  source 1..20: mol_type = other DNA
catagcaacctgacatatat

SEQ ID NO: 470 - DNA, 20 bp, synthetic construct
  source 1..20: mol_type = other DNA
acaaacattgtaaaaacata

SEQ ID NO: 471 - DNA, 20 bp, synthetic construct
  source 1..20: mol_type = other DNA
ttagaacatgtagccataat

SEQ ID NO: 472 - DNA, 20 bp, synthetic construct
  source 1..20: mol_type = other DNA
aattgtatttaatttaatga

SEQ ID NO: 473 - DNA, 20 bp, synthetic construct
  source 1..20: mol_type = other DNA
atcatactggagccaggtga

SEQ ID NO: 474 - DNA, 20 bp, synthetic construct
  source 1..20: mol_type = other DNA
aatgcagaaataagaccttc

SEQ ID NO: 475 - DNA, 20 bp, synthetic construct
  source 1..20: mol_type = other DNA
cagtcatccttatctaaggg

SEQ ID NO: 476 - DNA, 20 bp, synthetic construct
  source 1..20: mol_type = other DNA
aagccaaagagtactcttcc

SEQ ID NO: 477 - DNA, 20 bp, synthetic construct
  source 1..20: mol_type = other DNA
gatatctgggtgtgtcagct

SEQ ID NO: 478 - DNA, 20 bp, synthetic construct
  source 1..20: mol_type = other DNA
caacataaggtcttattgtt

SEQ ID NO: 479 - DNA, 20 bp, synthetic construct
  source 1..20: mol_type = other DNA
ggtcttctagaagctaatag

SEQ ID NO: 480 - DNA, 20 bp, synthetic construct
  source 1..20: mol_type = other DNA
ttgataagtggtcttctaga

SEQ ID NO: 481 - DNA, 20 bp, synthetic construct
  source 1..20: mol_type = other DNA
caattcttttgagtgtgtac

SEQ ID NO: 482 - DNA, 20 bp, synthetic construct
  source 1..20: mol_type = other DNA
tcaattcttttgagtgtgta

SEQ ID NO: 483 - DNA, 20 bp, synthetic construct
  source 1..20: mol_type = other DNA
gtgtgacattgtcatcatac

SEQ ID NO: 484 - DNA, 20 bp, synthetic construct
  source 1..20: mol_type = other DNA
ctttatgctttctgttcttt

SEQ ID NO: 485 - DNA, 20 bp, synthetic construct
  source 1..20: mol_type = other DNA
gagactctctttgtttcttt

SEQ ID NO: 486 - DNA, 20 bp, synthetic construct
  source 1..20: mol_type = other DNA
ttcattggaattcattgagc

SEQ ID NO: 487 - DNA, 20 bp, synthetic construct
  source 1..20: mol_type = other DNA
caagactttcttcttgtttt

SEQ ID NO: 488 - DNA, 20 bp, synthetic construct
  source 1..20: mol_type = other DNA
agtcagctgttaatcttcct

SEQ ID NO: 489 - DNA, 20 bp, synthetic construct
  source 1..20: mol_type = other DNA
tttttctttgagcattttta

SEQ ID NO: 490 - DNA, 20 bp, synthetic construct
  source 1..20: mol_type = other DNA
tttaagtatttagagaactc

SEQ ID NO: 491 - DNA, 20 bp, synthetic construct
  source 1..20: mol_type = other DNA
tacctaggctcacttgcttt

SEQ ID NO: 492 - DNA, 20 bp, synthetic construct
  source 1..20: mol_type = other DNA
tagttgttgatttgaataac

SEQ ID NO: 493 - DNA, 20 bp, synthetic construct
  source 1..20: mol_type = other DNA
tgtagttgttgatttgaata

SEQ ID NO: 494 - DNA, 20 bp, synthetic construct
  source 1..20: mol_type = other DNA
ttattttaaaatcacttcag

SEQ ID NO: 495 - DNA, 20 bp, synthetic construct
  source 1..20: mol_type = other DNA
tcttctttggcaaatatatt

SEQ ID NO: 496 - DNA, 20 bp, synthetic construct
  source 1..20: mol_type = other DNA
tccctttttgccatcttttg

SEQ ID NO: 497 - DNA, 20 bp, synthetic construct
  source 1..20: mol_type = other DNA
aataagtttctaatttacac

SEQ ID NO: 498 - DNA, 20 bp, synthetic construct
  source 1..20: mol_type = other DNA
tctcatgtgtttttgttcct

SEQ ID NO: 499 - DNA, 20 bp, synthetic construct
  source 1..20: mol_type = other DNA
taaacctggagattttatcc

SEQ ID NO: 500 - DNA, 20 bp, synthetic construct
  source 1..20: mol_type = other DNA
gggaacacaccattcagcag

SEQ ID NO: 501 - DNA, 20 bp, synthetic construct
  source 1..20: mol_type = other DNA
aatcttgttgactaaaagta

SEQ ID NO: 502 - DNA, 20 bp, synthetic construct
  source 1..20: mol_type = other DNA
gtctcacgctgtgtgaatca

SEQ ID NO: 503 - DNA, 20 bp, synthetic construct
  source 1..20: mol_type = other DNA
aggtctcacgctgtgtgaat

SEQ ID NO: 504 - DNA, 20 bp, synthetic construct
  source 1..20: mol_type = other DNA
tgctcctatttcaatatgag

SEQ ID NO: 505 - DNA, 20 bp, synthetic construct
  source 1..20: mol_type = other DNA
ataaggttcaaaagccggtg

SEQ ID NO: 506 - DNA, 20 bp, synthetic construct
  source 1..20: mol_type = other DNA
aactggtaacataaatgcag

SEQ ID NO: 507 - DNA, 20 bp, synthetic construct
  source 1..20: mol_type = other DNA
tcagagcaaaatggactgac

SEQ ID NO: 508 - DNA, 20 bp, synthetic construct
  source 1..20: mol_type = other DNA
tacaaatacccagtctgcag

SEQ ID NO: 509 - DNA, 20 bp, synthetic construct
  source 1..20: mol_type = other DNA
aaggcccttatcatatgcca

SEQ ID NO: 510 - DNA, 20 bp, synthetic construct
  source 1..20: mol_type = other DNA
tcctataaaagaagatattt

SEQ ID NO: 511 - DNA, 20 bp, synthetic construct
  source 1..20: mol_type = other DNA
ctgtgagagctctgccctca

SEQ ID NO: 512 - DNA, 20 bp, synthetic construct
  source 1..20: mol_type = other DNA
gttaatagtgttcttacatc

SEQ ID NO: 513 - DNA, 20 bp, synthetic construct
  source 1..20: mol_type = other DNA
cagtggagtcaagttggtta

SEQ ID NO: 514 - DNA, 20 bp, synthetic construct
  source 1..20: mol_type = other DNA
tctactagctaactttatca

SEQ ID NO: 515 - DNA, 20 bp, synthetic construct
  source 1..20: mol_type = other DNA
aggatcaaagcagaaattaa

SEQ ID NO: 516 - DNA, 20 bp, synthetic construct
  source 1..20: mol_type = other DNA
aaaaacatagactttactaa

SEQ ID NO: 517 - DNA, 20 bp, synthetic construct
  source 1..20: mol_type = other DNA
cacaaaaaactgattatata

SEQ ID NO: 518 - DNA, 20 bp, synthetic construct
  source 1..20: mol_type = other DNA
gatctgtgttgttcttaagt

SEQ ID NO: 519 - DNA, 20 bp, synthetic construct
  source 1..20: mol_type = other DNA
aaggtagattttatggctac

SEQ ID NO: 520 - DNA, 20 bp, synthetic construct
  source 1..20: mol_type = other DNA
gggcaaaaatagcaacataa

SEQ ID NO: 521 - DNA, 20 bp, synthetic construct
  source 1..20: mol_type = other DNA
aagacatagatgatcccata

SEQ ID NO: 522 - DNA, 20 bp, synthetic construct
  source 1..20: mol_type = other DNA
tatgagatgtaaggagacaa

SEQ ID NO: 523 - DNA, 20 bp, synthetic construct
  source 1..20: mol_type = other DNA
gataggagtaatcttttttt

SEQ ID NO: 524 - DNA, 20 bp, synthetic construct
  source 1..20: mol_type = other DNA
aaacaaaaactctcctaagt

SEQ ID NO: 525 - DNA, 20 bp, synthetic construct
  source 1..20: mol_type = other DNA
agaactaacagaattaagag

SEQ ID NO: 526 - DNA, 20 bp, synthetic construct
  source 1..20: mol_type = other DNA
cagaactaacagaattaaga

SEQ ID NO: 527 - DNA, 20 bp, synthetic construct
  source 1..20: mol_type = other DNA
acacagaactaacagaatta

SEQ ID NO: 528 - DNA, 20 bp, synthetic construct
  source 1..20: mol_type = other DNA
aaaaagaggaaaaccgaaag

SEQ ID NO: 529 - DNA, 20 bp, synthetic construct
  source 1..20: mol_type = other DNA
catacaaatgtcactaatat

SEQ ID NO: 530 - DNA, 20 bp, synthetic construct
  source 1..20: mol_type = other DNA
aagactagcatacaaatgtc

SEQ ID NO: 531 - DNA, 20 bp, synthetic construct
  source 1..20: mol_type = other DNA
acaggtgtatattccctatc

SEQ ID NO: 532 - DNA, 20 bp, synthetic construct
  source 1..20: mol_type = other DNA
atatatctactgaatatgat

SEQ ID NO: 533 - DNA, 20 bp, synthetic construct
  source 1..20: mol_type = other DNA
ctcagaaccctttggtctaa

SEQ ID NO: 534 - DNA, 20 bp, synthetic construct
  source 1..20: mol_type = other DNA
ctgacttgactttaatgaaa

SEQ ID NO: 535 - DNA, 20 bp, synthetic construct
  source 1..20: mol_type = other DNA
gcattcagcttatagcagaa

SEQ ID NO: 536 - DNA, 20 bp, synthetic construct
  source 1..20: mol_type = other DNA
ctgcattcagcttatagcag

SEQ ID NO: 537 - DNA, 20 bp, synthetic construct
  source 1..20: mol_type = other DNA
aaacattcctcataccacac

SEQ ID NO: 538 - DNA, 20 bp, synthetic construct
  source 1..20: mol_type = other DNA
cttatccttgatccagacaa

SEQ ID NO: 539 - DNA, 20 bp, synthetic construct
  source 1..20: mol_type = other DNA
aatgggaaatgctaaagttg

SEQ ID NO: 540 - DNA, 20 bp, synthetic construct
  source 1..20: mol_type = other DNA
agtgacacagtagttgtatc

SEQ ID NO: 541 - DNA, 20 bp, synthetic construct
  source 1..20: mol_type = other DNA
caatttcctctctaccaagc

SEQ ID NO: 542 - DNA, 20 bp, synthetic construct
  source 1..20: mol_type = other DNA
ctttgtcatttcatttataa

SEQ ID NO: 543 - DNA, 20 bp, synthetic construct
  source 1..20: mol_type = other DNA
atacaggcatctcagccctc

SEQ ID NO: 544 - DNA, 20 bp, synthetic construct
  source 1..20: mol_type = other DNA
aaagtaccaaagtggctgct

SEQ ID NO: 545 - DNA, 20 bp, synthetic construct
  source 1..20: mol_type = other DNA
aaaagtaccaaagtggctgc

SEQ ID NO: 546 - DNA, 20 bp, synthetic construct
  source 1..20: mol_type = other DNA
gaaataatgaactcacagtc

SEQ ID NO: 547 - DNA, 20 bp, synthetic construct
  source 1..20: mol_type = other DNA
cacagttgtttaggtcatct

SEQ ID NO: 548 - DNA, 20 bp, synthetic construct
  source 1..20: mol_type = other DNA
gcatgccatatttccttctt

SEQ ID NO: 549 - DNA, 20 bp, synthetic construct
  source 1..20: mol_type = other DNA
atagaggcatgccatatttc

SEQ ID NO: 550 - DNA, 20 bp, synthetic construct
  source 1..20: mol_type = other DNA
agcaaaaataatcttagaaa

SEQ ID NO: 551 - DNA, 20 bp, synthetic construct
  source 1..20: mol_type = other DNA
gattccaggccttctatctc

SEQ ID NO: 552 - DNA, 20 bp, synthetic construct
  source 1..20: mol_type = other DNA
ggtctcaatgaggaaaagga

SEQ ID NO: 553 - DNA, 20 bp, synthetic construct
  source 1..20: mol_type = other DNA
ataaaagcaaaagagagtta

SEQ ID NO: 554 - DNA, 20 bp, synthetic construct
  source 1..20: mol_type = other DNA
tctattctgaaaccccaata

SEQ ID NO: 555 - DNA, 20 bp, synthetic construct
  source 1..20: mol_type = other DNA
gacatgccatcaagagaaga

SEQ ID NO: 556 - DNA, 20 bp, synthetic construct
  source 1..20: mol_type = other DNA
atgtattaaccaatattttg

SEQ ID NO: 557 - DNA, 20 bp, synthetic construct
  source 1..20: mol_type = other DNA
agaacccacttgatctatta

SEQ ID NO: 558 - DNA, 20 bp, synthetic construct
  source 1..20: mol_type = other DNA
taaagaattgagtaccaaaa

SEQ ID NO: 559 - DNA, 20 bp, synthetic construct
  source 1..20: mol_type = other DNA
tatcacattaattccctctc

SEQ ID NO: 560 - DNA, 20 bp, synthetic construct
  source 1..20: mol_type = other DNA
tagaatagaaaagcatgaag

SEQ ID NO: 561 - DNA, 20 bp, synthetic construct
  source 1..20: mol_type = other DNA
aacaactatatttgcttgta

SEQ ID NO: 562 - DNA, 20 bp, synthetic construct
  source 1..20: mol_type = other DNA
ataatcacactaaatcttaa

SEQ ID NO: 563 - DNA, 20 bp, synthetic construct
  source 1..20: mol_type = other DNA
cctctattaagatctatgag

SEQ ID NO: 564 - DNA, 20 bp, synthetic construct
  source 1..20: mol_type = other DNA
acttcatcaatatttcccca

SEQ ID NO: 565 - DNA, 20 bp, synthetic construct
  source 1..20: mol_type = other DNA
gcacttaaatttatcagttg

SEQ ID NO: 566 - DNA, 20 bp, synthetic construct
  source 1..20: mol_type = other DNA
aagcacttaaatttatcagt

SEQ ID NO: 567 - DNA, 20 bp, synthetic construct
  source 1..20: mol_type = other DNA
ttagtatgtcgagaactcaa

SEQ ID NO: 568 - DNA, 20 bp, synthetic construct
  source 1..20: mol_type = other DNA
aagttgaaacacattttagc

SEQ ID NO: 569 - DNA, 20 bp, synthetic construct
  source 1..20: mol_type = other DNA
aggattaaaagttgaaacac

SEQ ID NO: 570 - DNA, 20 bp, synthetic construct
  source 1..20: mol_type = other DNA
caggattaaaagttgaaaca

SEQ ID NO: 571 - DNA, 20 bp, synthetic construct
  source 1..20: mol_type = other DNA
aatcagggaagcaggattaa

SEQ ID NO: 572 - DNA, 20 bp, synthetic construct
  source 1..20: mol_type = other DNA
tgattactcttggcagtaat

SEQ ID NO: 573 - DNA, 20 bp, synthetic construct
  source 1..20: mol_type = other DNA
tgatagatacttgtattagc

SEQ ID NO: 574 - DNA, 20 bp, synthetic construct
  source 1..20: mol_type = other DNA
caaatctaaagctcatttac

SEQ ID NO: 575 - DNA, 20 bp, synthetic construct
  source 1..20: mol_type = other DNA
ctaccaaaatgtcaaatcta

SEQ ID NO: 576 - DNA, 20 bp, synthetic construct
  source 1..20: mol_type = other DNA
gtaacctgaatatttcatga

SEQ ID NO: 577 - DNA, 20 bp, synthetic construct
  source 1..20: mol_type = other DNA
aaataatggtaacctgaata

SEQ ID NO: 578 - DNA, 20 bp, synthetic construct
  source 1..20: mol_type = other DNA
aatacattactgaaataatg

SEQ ID NO: 579 - DNA, 20 bp, synthetic construct
  source 1..20: mol_type = other DNA
tttaccttgacattctaata

SEQ ID NO: 580 - DNA, 20 bp, synthetic construct
  source 1..20: mol_type = other DNA
ttaacctattttaataatat

SEQ ID NO: 581 - DNA, 20 bp, synthetic construct
  source 1..20: mol_type = other DNA
ttaagtgattggaaataaaa

SEQ ID NO: 582 - DNA, 20 bp, synthetic construct
  source 1..20: mol_type = other DNA
caattaggaatatttaagtg

SEQ ID NO: 583 - DNA, 20 bp, synthetic construct
  source 1..20: mol_type = other DNA
ccaggcaatggctctttcaa

SEQ ID NO: 584 - DNA, 20 bp, synthetic construct
  source 1..20: mol_type = other DNA
tgtatagtttacccaggcaa

SEQ ID NO: 585 - DNA, 20 bp, synthetic construct
  source 1..20: mol_type = other DNA
ctttatcaatctaatcaatt

SEQ ID NO: 586 - DNA, 20 bp, synthetic construct
  source 1..20: mol_type = other DNA
actttatagtgtggatggta

SEQ ID NO: 587 - DNA, 20 bp, synthetic construct
  source 1..20: mol_type = other DNA
ttttagggaattgtcctgat

SEQ ID NO: 588 - DNA, 20 bp, synthetic construct
  source 1..20: mol_type = other DNA
aaggaaacacacataatacc

SEQ ID NO: 589 - DNA, 20 bp, synthetic construct
  source 1..20: mol_type = other DNA
ggaaggaaacacacataata

SEQ ID NO: 590 - DNA, 20 bp, synthetic construct
  source 1..20: mol_type = other DNA
cactaaggacaaagatatgg

SEQ ID NO: 591 - DNA, 20 bp, synthetic construct
  source 1..20: mol_type = other DNA
tatttgttcattctcaagaa

SEQ ID NO: 592 - DNA, 20 bp, synthetic construct
  source 1..20: mol_type = other DNA
caacctgggctctcatctaa

SEQ ID NO: 593 - DNA, 20 bp, synthetic construct
  source 1..20: mol_type = other DNA
aatgcttgatctgtgggctc

SEQ ID NO: 594 - DNA, 20 bp, synthetic construct
  source 1..20: mol_type = other DNA
attgtgtacacagggatttg

SEQ ID NO: 595 - DNA, 20 bp, synthetic construct
  source 1..20: mol_type = other DNA
aactgtatactttgaaagta

SEQ ID NO: 596 - DNA, 20 bp, synthetic construct
  source 1..20: mol_type = other DNA
gaagcaagtaagtaaataat

SEQ ID NO: 597 - DNA, 20 bp, synthetic construct
  source 1..20: mol_type = other DNA
cttagatgtgtttatccaaa

SEQ ID NO: 598 - DNA, 20 bp, synthetic construct
  source 1..20: mol_type = other DNA
gtgtttttccatttttctct

SEQ ID NO: 599 - DNA, 20 bp, synthetic construct
  source 1..20: mol_type = other DNA
tggctctatcaaggcttccc

SEQ ID NO: 600 - DNA, 20 bp, synthetic construct
  source 1..20: mol_type = other DNA
aatcctatattttggctcta

SEQ ID NO: 601 - DNA, 20 bp, synthetic construct
  source 1..20: mol_type = other DNA
gaactatcctgcatccgagg

SEQ ID NO: 602 - DNA, 20 bp, synthetic construct
  source 1..20: mol_type = other DNA
caaccatcgagatgatcata

SEQ ID NO: 603 - DNA, 20 bp, synthetic construct
  source 1..20: mol_type = other DNA
taaatgcttttctaaatcta

SEQ ID NO: 604 - DNA, 20 bp, synthetic construct
  source 1..20: mol_type = other DNA
gcttttatagtgttgaggca

SEQ ID NO: 605 - DNA, 20 bp, synthetic construct
  source 1..20: mol_type = other DNA
ttaagctctaattaaaacag

SEQ ID NO: 606 - DNA, 20 bp, synthetic construct
  source 1..20: mol_type = other DNA
tatttcactggagctttgat

SEQ ID NO: 607 - DNA, 20 bp, synthetic construct
  source 1..20: mol_type = other DNA
aatcatctactgatgaacac

SEQ ID NO: 608 - DNA, 20 bp, synthetic construct
  source 1..20: mol_type = other DNA
tctttatctaatcatctact

SEQ ID NO: 609 - DNA, 20 bp, synthetic construct
  source 1..20: mol_type = other DNA
ttctctttatctaatcatct

SEQ ID NO: 610 - DNA, 20 bp, synthetic construct
  source 1..20: mol_type = other DNA
agttcctggaaaccgccatt

SEQ ID NO: 611 - DNA, 20 bp, synthetic construct
  source 1..20: mol_type = other DNA
atgctgttgtacactagatc

SEQ ID NO: 612 - DNA, 20 bp, synthetic construct
  source 1..20: mol_type = other DNA
gtacactattgttttgatat

SEQ ID NO: 613 - DNA, 20 bp, synthetic construct
  source 1..20: mol_type = other DNA
cacccctaatttatattact

SEQ ID NO: 614 - DNA, 20 bp, synthetic construct
  source 1..20: mol_type = other DNA
cataggtcaattccttcacc

SEQ ID NO: 615 - DNA, 20 bp, synthetic construct
  source 1..20: mol_type = other DNA
ttaatttaaatagtttacaa

SEQ ID NO: 616 - DNA, 20 bp, synthetic construct
  source 1..20: mol_type = other DNA
ctagcttgaatggataccaa

SEQ ID NO: 617 - DNA, 20 bp, synthetic construct
  source 1..20: mol_type = other DNA
tagtggttgccttagtatta

SEQ ID NO: 618 - DNA, 20 bp, synthetic construct
  source 1..20: mol_type = other DNA
caagtgctatatttttttaa

SEQ ID NO: 619 - DNA, 20 bp, synthetic construct
  source 1..20: mol_type = other DNA
tatatataattgagggccac

SEQ ID NO: 620 - DNA, 20 bp, synthetic construct
  source 1..20: mol_type = other DNA
ataattataagatagggttt

SEQ ID NO: 621 - DNA, 20 bp, synthetic construct
  source 1..20: mol_type = other DNA
attagtattgctgctctagc

SEQ ID NO: 622 - DNA, 20 bp, synthetic construct
  source 1..20: mol_type = other DNA
ccaactgtaatcattgattt

SEQ ID NO: 623 - DNA, 20 bp, synthetic construct
  source 1..20: mol_type = other DNA
gataatgtgtagttttttat

SEQ ID NO: 624 - DNA, 20 bp, synthetic construct
  source 1..20: mol_type = other DNA
taaggtgttgtatgataatg

SEQ ID NO: 625 - DNA, 20 bp, synthetic construct
  source 1..20: mol_type = other DNA
aatatgtgtcatcctgaaga

SEQ ID NO: 626 - DNA, 20 bp, synthetic construct
  source 1..20: mol_type = other DNA
tcattgtgaatttcccacat

SEQ ID NO: 627 - DNA, 20 bp, synthetic construct
  source 1..20: mol_type = other DNA
ttagggatatactgttatac

SEQ ID NO: 628 - DNA, 20 bp, synthetic construct
  source 1..20: mol_type = other DNA
aaaattaggttattggattg

SEQ ID NO: 629 - DNA, 20 bp, synthetic construct
  source 1..20: mol_type = other DNA
ctttcactctcatttcttaa

SEQ ID NO: 630 - DNA, 20 bp, synthetic construct
  source 1..20: mol_type = other DNA
actttcaagtttattaattt

SEQ ID NO: 631 - DNA, 20 bp, synthetic construct
  source 1..20: mol_type = other DNA
tactttcatttatgtctagt

SEQ ID NO: 632 - DNA, 20 bp, synthetic construct
  source 1..20: mol_type = other DNA
gatatctatactttcattta

SEQ ID NO: 633 - DNA, 20 bp, synthetic construct
  source 1..20: mol_type = other DNA
catgtttttacaccagctgt

SEQ ID NO: 634 - DNA, 20 bp, synthetic construct
  source 1..20: mol_type = other DNA
ttacttactcaatttcttct

SEQ ID NO: 635 - DNA, 20 bp, synthetic construct
  source 1..20: mol_type = other DNA
gtttcagcagtttctgctcc

SEQ ID NO: 636 - DNA, 20 bp, synthetic construct
  source 1..20: mol_type = other DNA
gggcacttaggagttcctaa

SEQ ID NO: 637 - DNA, 20 bp, synthetic construct
  source 1..20: mol_type = other DNA
ctctgagagtgtttagaaat

SEQ ID NO: 638 - DNA, 20 bp, synthetic construct
  source 1..20: mol_type = other DNA
gtgaaagaaaatgctctgag

SEQ ID NO: 639 - DNA, 20 bp, synthetic construct
  source 1..20: mol_type = other DNA
tacatcagacaaggctcagg

SEQ ID NO: 640 - DNA, 20 bp, synthetic construct
  source 1..20: mol_type = other DNA
ttctataatcttatggttaa

SEQ ID NO: 641 - DNA, 20 bp, synthetic construct
  source 1..20: mol_type = other DNA
gaagtgttctataatcttat

SEQ ID NO: 642 - DNA, 20 bp, synthetic construct
  source 1..20: mol_type = other DNA
gtgaaaattttgtaggttgc

SEQ ID NO: 643 - DNA, 20 bp, synthetic construct
  source 1..20: mol_type = other DNA
tacaatcagtgtctttcacc

SEQ ID NO: 644 - DNA, 20 bp, synthetic construct
  source 1..20: mol_type = other DNA
atggttagggctatgttatg

SEQ ID NO: 645 - DNA, 20 bp, synthetic construct
  source 1..20: mol_type = other DNA
gaaataaaacgcaatgtatc

SEQ ID NO: 646 - DNA, 20 bp, synthetic construct
  source 1..20: mol_type = other DNA
cttgcatgttgcctttttct

SEQ ID NO: 647 - DNA, 20 bp, synthetic construct
  source 1..20: mol_type = other DNA
aactctctgccattattact

SEQ ID NO: 648 - DNA, 20 bp, synthetic construct
  source 1..20: mol_type = other DNA
taatctcactggatacagaa

SEQ ID NO: 649 - DNA, 20 bp, synthetic construct
  source 1..20: mol_type = other DNA
aaacattttaccattttata

SEQ ID NO: 650 - DNA, 20 bp, synthetic construct
  source 1..20: mol_type = other DNA
gttattctccctcttgaacc

SEQ ID NO: 651 - DNA, 20 bp, synthetic construct
  source 1..20: mol_type = other DNA
tctgttattctccctcttga

SEQ ID NO: 652 - DNA, 20 bp, synthetic construct
  source 1..20: mol_type = other DNA
ggtctgttattctccctctt

SEQ ID NO: 653 - DNA, 20 bp, synthetic construct
  source 1..20: mol_type = other DNA
taaggtctgttattctccct

SEQ ID NO: 654 - DNA, 20 bp, synthetic construct
  source 1..20: mol_type = other DNA
aaagtaaggtctgttattct

SEQ ID NO: 655 - DNA, 20 bp, synthetic construct
  source 1..20: mol_type = other DNA
ctaaaagtaaggtctgttat

SEQ ID NO: 656 - DNA, 20 bp, synthetic construct
  source 1..20: mol_type = other DNA
gactaaaagtaaggtctgtt

SEQ ID NO: 657 - DNA, 20 bp, synthetic construct
  source 1..20: mol_type = other DNA
aatgactaaaagtaaggtct

SEQ ID NO: 658 - DNA, 20 bp, synthetic construct
  source 1..20: mol_type = other DNA
aaagatatagaactgaaaag

SEQ ID NO: 659 - DNA, 20 bp, synthetic construct
  source 1..20: mol_type = other DNA
gttggagacttcaatttcct

SEQ ID NO: 660 - DNA, 20 bp, synthetic construct
  source 1..20: mol_type = other DNA
aaacaacagagcctcaaata

SEQ ID NO: 661 - DNA, 20 bp, synthetic construct
  source 1..20: mol_type = other DNA
aaaataccacaaagataggc

SEQ ID NO: 662 - DNA, 20 bp, synthetic construct
  source 1..20: mol_type = other DNA
aagaatggaaaagatgtatc

SEQ ID NO: 663 - DNA, 20 bp, synthetic construct
  source 1..20: mol_type = other DNA
taaaagaatggaaaagatgt

SEQ ID NO: 664 - DNA, 20 bp, synthetic construct
  source 1..20: mol_type = other DNA
aattttacctcagtataaaa

SEQ ID NO: 665 - DNA, 20 bp, synthetic construct
  source 1..20: mol_type = other DNA
attaccaaatgccactgtat

SEQ ID NO: 666 - DNA, 20 bp, synthetic construct
  source 1..20: mol_type = other DNA
gttgcataacatgtgtatta

SEQ ID NO: 667 - DNA, 20 bp, synthetic construct
  source 1..20: mol_type = other DNA
aattaactgcttaatgagta

SEQ ID NO: 668 - DNA, 20 bp, synthetic construct
  source 1..20: mol_type = other DNA
ataaaggtcacttattgtat

SEQ ID NO: 669 - DNA, 20 bp, synthetic construct
  source 1..20: mol_type = other DNA
aataaaactgatacatacta

SEQ ID NO: 670 - DNA, 20 bp, synthetic construct
  source 1..20: mol_type = other DNA
aatcaacttttagctataca

SEQ ID NO: 671 - DNA, 20 bp, synthetic construct
  source 1..20: mol_type = other DNA
tatcattatgacctaggaat

SEQ ID NO: 672 - DNA, 20 bp, synthetic construct
  source 1..20: mol_type = other DNA
actggaattactaaaaggga

SEQ ID NO: 673 - DNA, 20 bp, synthetic construct
  source 1..20: mol_type = other DNA
agtagagagtgggatggtat

SEQ ID NO: 674 - DNA, 20 bp, synthetic construct
  source 1..20: mol_type = other DNA
taagaaacatcacattcaag

SEQ ID NO: 675 - DNA, 20 bp, synthetic construct
  source 1..20: mol_type = other DNA
tgaacagaatgagaagttta

SEQ ID NO: 676 - DNA, 20 bp, synthetic construct
  source 1..20: mol_type = other DNA
tctgaacagaatgagaagtt

SEQ ID NO: 677 - DNA, 20 bp, synthetic construct
  source 1..20: mol_type = other DNA
tggtgtacattggatatgaa

SEQ ID NO: 678 - DNA, 20 bp, synthetic construct
  source 1..20: mol_type = other DNA
tttctaacatttactgtgga

SEQ ID NO: 679 - DNA, 20 bp, synthetic construct
  source 1..20: mol_type = other DNA
ttctaacatactaattagca

SEQ ID NO: 680 - DNA, 20 bp, synthetic construct
  source 1..20: mol_type = other DNA
caccaatgcaagccagcttc

SEQ ID NO: 681 - DNA, 20 bp, synthetic construct
  source 1..20: mol_type = other DNA
tgtttagaggtcaagccctg

SEQ ID NO: 682 - DNA, 20 bp, synthetic construct
  source 1..20: mol_type = other DNA
atcagtcaaaacatgttctg

SEQ ID NO: 683 - DNA, 20 bp, synthetic construct
  source 1..20: mol_type = other DNA
tattacacaaggtattggta

SEQ ID NO: 684 - DNA, 20 bp, synthetic construct
  source 1..20: mol_type = other DNA
atgaaaggtttattacacaa

SEQ ID NO: 685 - DNA, 20 bp, synthetic construct
  source 1..20: mol_type = other DNA
aatcaatttgtgccacaggc

SEQ ID NO: 686 - DNA, 20 bp, synthetic construct
  source 1..20: mol_type = other DNA
gcagcttataaagagagcca

SEQ ID NO: 687 - DNA, 20 bp, synthetic construct
  source 1..20: mol_type = other DNA
tttggtaggtaactacgggt

SEQ ID NO: 688 - DNA, 20 bp, synthetic construct
  source 1..20: mol_type = other DNA
tcggatatagcttttacata

SEQ ID NO: 689 - DNA, 20 bp, synthetic construct
  source 1..20: mol_type = other DNA
aaactaagcacatccgatag

SEQ ID NO: 690 - DNA, 20 bp, synthetic construct
  source 1..20: mol_type = other DNA
atcatctttgatttgacttt

SEQ ID NO: 691 - DNA, 20 bp, synthetic construct
  source 1..20: mol_type = other DNA
ttctttatgaatctttgaaa

SEQ ID NO: 692 - DNA, 20 bp, synthetic construct
  source 1..20: mol_type = other DNA
gtaaagagccacctaaggga

SEQ ID NO: 693 - DNA, 20 bp, synthetic construct
  source 1..20: mol_type = other DNA
atgagatgggcacagtaaag

SEQ ID NO: 694 - DNA, 20 bp, synthetic construct
  source 1..20: mol_type = other DNA
tccccagataatgcatagat

SEQ ID NO: 695 - DNA, 20 bp, synthetic construct
  source 1..20: mol_type = other DNA
ggtggcatagaaggcagcac

SEQ ID NO: 696 - DNA, 20 bp, synthetic construct
  source 1..20: mol_type = other DNA
ggatgcagcaggagaagaaa

SEQ ID NO: 697 - DNA, 20 bp, synthetic construct
  source 1..20: mol_type = other DNA
aaggcaaggctaaggagtgc

SEQ ID NO: 698 - DNA, 20 bp, synthetic construct
  source 1..20: mol_type = other DNA
agagagctagagctaggact

SEQ ID NO: 699 - DNA, 20 bp, synthetic construct
  source 1..20: mol_type = other DNA
atcccaaagttacacagaga

SEQ ID NO: 700 - DNA, 20 bp, synthetic construct
  source 1..20: mol_type = other DNA
cacctgtatccaaaattcaa

SEQ ID NO: 701 - DNA, 20 bp, synthetic construct
  source 1..20: mol_type = other DNA
catatctgaagcacagagag

SEQ ID NO: 702 - DNA, 20 bp, synthetic construct
  source 1..20: mol_type = other DNA
cagtctgctctgctgctctg

SEQ ID NO: 703 - DNA, 20 bp, synthetic construct
  source 1..20: mol_type = other DNA
tccagtctgctctgctgctc

SEQ ID NO: 704 - DNA, 20 bp, synthetic construct
  source 1..20: mol_type = other DNA
agctcagaggcagcaggagc

SEQ ID NO: 705 - DNA, 20 bp, synthetic construct
  source 1..20: mol_type = other DNA
ctaagctccatatttaaatc

SEQ ID NO: 706 - DNA, 20 bp, synthetic construct
  source 1..20: mol_type = other DNA
ttcaggcttccttcacagcc

SEQ ID NO: 707 - DNA, 20 bp, synthetic construct
  source 1..20: mol_type = other DNA
ttcttcaggcttccttcaca

SEQ ID NO: 708 - DNA, 20 bp, synthetic construct
  source 1..20: mol_type = other DNA
ggaatcagtgctacccatta

SEQ ID NO: 709 - DNA, 20 bp, synthetic construct
  source 1..20: mol_type = other DNA
ttagccatcattttattctc

SEQ ID NO: 710 - DNA, 20 bp, synthetic construct
  source 1..20: mol_type = other DNA
ggcccattttttcaatctca

SEQ ID NO: 711 - DNA, 20 bp, synthetic construct
  source 1..20: mol_type = other DNA
catggtcttccttgactaca

SEQ ID NO: 712 - DNA, 20 bp, synthetic construct
  source 1..20: mol_type = other DNA
aagccaatgcgcaagaaaag

SEQ ID NO: 713 - DNA, 20 bp, synthetic construct
  source 1..20: mol_type = other DNA
catccagttaatctctgaca

SEQ ID NO: 714 - DNA, 20 bp, synthetic construct
  source 1..20: mol_type = other DNA
ctcgcatccagttaatctct

SEQ ID NO: 715 - DNA, 20 bp, synthetic construct
  source 1..20: mol_type = other DNA
acaccatcccagaaatggtc

SEQ ID NO: 716 - DNA, 20 bp, synthetic construct
  source 1..20: mol_type = other DNA
tttctgactccctatccagt

SEQ ID NO: 717 - DNA, 20 bp, synthetic construct
  source 1..20: mol_type = other DNA
ttccccagggtcataggagt

SEQ ID NO: 718 - DNA, 20 bp, synthetic construct
  source 1..20: mol_type = other DNA
gcactgtcccagttggatta

SEQ ID NO: 719 - DNA, 20 bp, synthetic construct
  source 1..20: mol_type = other DNA
acccagcaaaatgtgggtct

SEQ ID NO: 720 - DNA, 20 bp, synthetic construct
  source 1..20: mol_type = other DNA
ttggttgtggtgaaacccag

SEQ ID NO: 721 - DNA, 20 bp, synthetic construct
  source 1..20: mol_type = other DNA
tgttaaaagagaaaagaatc

SEQ ID NO: 722 - DNA, 20 bp, synthetic construct
  source 1..20: mol_type = other DNA
ttgcagtgatgtactgatgt

SEQ ID NO: 723 - DNA, 20 bp, synthetic construct
  source 1..20: mol_type = other DNA
ttgtttttataagcaattag

SEQ ID NO: 724 - DNA, 20 bp, synthetic construct
  source 1..20: mol_type = other DNA
tataaatatgcccatatgct

SEQ ID NO: 725 - DNA, 20 bp, synthetic construct
  source 1..20: mol_type = other DNA
ctgcctgcaactataaatat

SEQ ID NO: 726 - DNA, 20 bp, synthetic construct
  source 1..20: mol_type = other DNA
gtatctcctagcccagtgcc

SEQ ID NO: 727 - DNA, 20 bp, synthetic construct
  source 1..20: mol_type = other DNA
actgtatctcctagcccagt

SEQ ID NO: 728 - DNA, 20 bp, synthetic construct
  source 1..20: mol_type = other DNA
gattgctttattgcaactaa

SEQ ID NO: 729 - DNA, 20 bp, synthetic construct
  source 1..20: mol_type = other DNA
cttaaatagtaggaaagcca

SEQ ID NO: 730 - DNA, 20 bp, synthetic construct
  source 1..20: mol_type = other DNA
gcacactgtacaggagggtg

SEQ ID NO: 731 - DNA, 20 bp, synthetic construct
  source 1..20: mol_type = other DNA
cactgcacactgtacaggag

SEQ ID NO: 732 - DNA, 20 bp, synthetic construct
  source 1..20: mol_type = other DNA
gattcactgcacactgtaca

SEQ ID NO: 733 - DNA, 20 bp, synthetic construct
  source 1..20: mol_type = other DNA
tgttgattcactgcacactg

SEQ ID NO: 734 - DNA, 20 bp, synthetic construct
  source 1..20: mol_type = other DNA
atgatgttgattcactgcac

SEQ ID NO: 735 - DNA, 20 bp, synthetic construct
  source 1..20: mol_type = other DNA
ggaaatgatgttgattcact

SEQ ID NO: 736 - DNA, 20 bp, synthetic construct
  source 1..20: mol_type = other DNA
tgtggaaatgatgttgattc

SEQ ID NO: 737 - DNA, 20 bp, synthetic construct
  source 1..20: mol_type = other DNA
cagtatcttaactggtgaac

SEQ ID NO: 738 - DNA, 20 bp, synthetic construct
  source 1..20: mol_type = other DNA
acatagaattatcattatga

SEQ ID NO: 739 - DNA, 20 bp, synthetic construct
  source 1..20: mol_type = other DNA
atgggttaaaatacttataa

SEQ ID NO: 740 - DNA, 20 bp, synthetic construct
  source 1..20: mol_type = other DNA
taaaacctttgtgcataatg

SEQ ID NO: 741 - DNA, 20 bp, synthetic construct
  source 1..20: mol_type = other DNA
caacaacaaaagcggataaa

SEQ ID NO: 742 - DNA, 20 bp, synthetic construct
  source 1..20: mol_type = other DNA
atgacactaggttttgcaaa

SEQ ID NO: 743 - DNA, 20 bp, synthetic construct
  source 1..20: mol_type = other DNA
acctcatgacactaggtttt

SEQ ID NO: 744 - DNA, 20 bp, synthetic construct
  source 1..20: mol_type = other DNA
gtatagacccaaactataaa

SEQ ID NO: 745 - DNA, 20 bp, synthetic construct
  source 1..20: mol_type = other DNA
atgtatagacccaaactata

SEQ ID NO: 746 - DNA, 20 bp, synthetic construct
  source 1..20: mol_type = other DNA
tgatctcttcaacaaattgt

SEQ ID NO: 747 - DNA, 20 bp, synthetic construct
  source 1..20: mol_type = other DNA
aatgttgccgaaagaaaaga

SEQ ID NO: 748 - DNA, 20 bp, synthetic construct
  source 1..20: mol_type = other DNA
acaagtgtcatatactaaat

SEQ ID NO: 749 - DNA, 20 bp, synthetic construct
  source 1..20: mol_type = other DNA
aaatttaaccaaggagttac

SEQ ID NO: 750 - DNA, 20 bp, synthetic construct
  source 1..20: mol_type = other DNA
agccatctaaaagagaaatt

SEQ ID NO: 751 - DNA, 20 bp, synthetic construct
  source 1..20: mol_type = other DNA
gatcaagaagtaaaattatc

SEQ ID NO: 752 - DNA, 20 bp, synthetic construct
  source 1..20: mol_type = other DNA
cacatgataatctcaattat

SEQ ID NO: 753 - DNA, 20 bp, synthetic construct
  source 1..20: mol_type = other DNA
gaaaaattcactctataggt

SEQ ID NO: 754 - DNA, 20 bp, synthetic construct
  source 1..20: mol_type = other DNA
ctatagagagatagatatta

SEQ ID NO: 755 - DNA, 20 bp, synthetic construct
  source 1..20: mol_type = other DNA
agaaaaatgtctttccaaat

SEQ ID NO: 756 - DNA, 20 bp, synthetic construct
  source 1..20: mol_type = other DNA
caaatacttaaatcaactgt

SEQ ID NO: 757 - DNA, 20 bp, synthetic construct
  source 1..20: mol_type = other DNA
ggagggaggaaaattatttc

SEQ ID NO: 758 - DNA, 20 bp, synthetic construct
  source 1..20: mol_type = other DNA
agcaaacaacagcaacatgc

SEQ ID NO: 759 - DNA, 20 bp, synthetic construct
  source 1..20: mol_type = other DNA
aaaatactttagaaaagtca

SEQ ID NO: 760 - DNA, 20 bp, synthetic construct
  source 1..20: mol_type = other DNA
cagaattcaatggacccaca

SEQ ID NO: 761 - DNA, 20 bp, synthetic construct
  source 1..20: mol_type = other DNA
tcggcaaaggcattattatt

SEQ ID NO: 762 - DNA, 20 bp, synthetic construct
  source 1..20: mol_type = other DNA
gctttcacctataggtggcc

SEQ ID NO: 763 - DNA, 20 bp, synthetic construct
  source 1..20: mol_type = other DNA
gatgttaagctttcacctat

SEQ ID NO: 764 - DNA, 20 bp, synthetic construct
  source 1..20: mol_type = other DNA
tacccagggtaggattcatg

SEQ ID NO: 765 - DNA, 20 bp, synthetic construct
  source 1..20: mol_type = other DNA
gcatacccagggtaggattc

SEQ ID NO: 766 - DNA, 20 bp, synthetic construct
  source 1..20: mol_type = other DNA
gtgcatacccagggtaggat

SEQ ID NO: 767 - DNA, 20 bp, synthetic construct
  source 1..20: mol_type = other DNA
catgtgcatacccagggtag

SEQ ID NO: 768 - DNA, 20 bp, synthetic construct
  source 1..20: mol_type = other DNA
agatcatgtgcatacccagg

SEQ ID NO: 769 - DNA, 20 bp, synthetic construct
  source 1..20: mol_type = other DNA
agaagatcatgtgcataccc

SEQ ID NO: 770 - DNA, 20 bp, synthetic construct
  source 1..20: mol_type = other DNA
taagaagatcatgtgcatac

SEQ ID NO: 771 - DNA, 20 bp, synthetic construct
  source 1..20: mol_type = other DNA
aattaagaagatcatgtgca

SEQ ID NO: 772 - DNA, 20 bp, synthetic construct
  source 1..20: mol_type = other DNA
gttcagatgaacaataagca

SEQ ID NO: 773 - DNA, 20 bp, synthetic construct
  source 1..20: mol_type = other DNA
actcatgctggttactaggg

SEQ ID NO: 774 - DNA, 20 bp, synthetic construct
  source 1..20: mol_type = other DNA
tcatatgggtggtcgctaat

SEQ ID NO: 775 - DNA, 20 bp, synthetic construct
  source 1..20: mol_type = other DNA
acactaacgatgaactctaa

SEQ ID NO: 776 - DNA, 20 bp, synthetic construct
  source 1..20: mol_type = other DNA
taacactaacgatgaactct

SEQ ID NO: 777 - DNA, 20 bp, synthetic construct
  source 1..20: mol_type = other DNA
ttaaaactcaacccagtgca

SEQ ID NO: 778 - DNA, 20 bp, synthetic construct
  source 1..20: mol_type = other DNA
attcctagagaaaacctagg

SEQ ID NO: 779 - DNA, 20 bp, synthetic construct
  source 1..20: mol_type = other DNA
agaacaatgtttcttatgaa

SEQ ID NO: 780 - DNA, 20 bp, synthetic construct
  source 1..20: mol_type = other DNA
gaaactgggatattaccaat

SEQ ID NO: 781 - DNA, 20 bp, synthetic construct
  source 1..20: mol_type = other DNA
aaaatggaaactgggatatt

SEQ ID NO: 782 - DNA, 20 bp, synthetic construct
  source 1..20: mol_type = other DNA
aaaaattaaaggccaacaga

SEQ ID NO: 783 - DNA, 20 bp, synthetic construct
  source 1..20: mol_type = other DNA
ttatggcaggtagtgaaagg

SEQ ID NO: 784 - DNA, 20 bp, synthetic construct
  source 1..20: mol_type = other DNA
acaatatgcaaaaattaaat

SEQ ID NO: 785 - DNA, 20 bp, synthetic construct
  source 1..20: mol_type = other DNA
cattctccaacatagatcct

SEQ ID NO: 786 - DNA, 20 bp, synthetic construct
  source 1..20: mol_type = other DNA
caataatagagactttacca

SEQ ID NO: 787 - DNA, 20 bp, synthetic construct
  source 1..20: mol_type = other DNA
atatattatgtaaatgtaac

SEQ ID NO: 788 - DNA, 20 bp, synthetic construct
  source 1..20: mol_type = other DNA
aggatggaaaagatatatta

SEQ ID NO: 789 - DNA, 20 bp, synthetic construct
  source 1..20: mol_type = other DNA
aaacaggttgaaaatgaaag

SEQ ID NO: 790 - DNA, 20 bp, synthetic construct
  source 1..20: mol_type = other DNA
aaaggcaatattgaaggaaa

SEQ ID NO: 791 - DNA, 20 bp, synthetic construct
  source 1..20: mol_type = other DNA
gaattgagttaataattcct

SEQ ID NO: 792 - DNA, 20 bp, synthetic construct
  source 1..20: mol_type = other DNA
tctcacagagaaagaggtgg

SEQ ID NO: 793 - DNA, 20 bp, synthetic construct
  source 1..20: mol_type = other DNA
ttttctataatctcacagag

SEQ ID NO: 794 - DNA, 20 bp, synthetic construct
  source 1..20: mol_type = other DNA
ggctcagaaaacatcctttt

SEQ ID NO: 795 - DNA, 20 bp, synthetic construct
  source 1..20: mol_type = other DNA
atttaatttacacttaatta

SEQ ID NO: 796 - DNA, 20 bp, synthetic construct
  source 1..20: mol_type = other DNA
actttcctctgcttataact

SEQ ID NO: 797 - DNA, 20 bp, synthetic construct
  source 1..20: mol_type = other DNA
actatactttcctctgctta

SEQ ID NO: 798 - DNA, 20 bp, synthetic construct
  source 1..20: mol_type = other DNA
agcaattagaaatcacatga

SEQ ID NO: 799 - DNA, 20 bp, synthetic construct
  source 1..20: mol_type = other DNA
aaagcagtaaacaataagtg

SEQ ID NO: 800 - DNA, 20 bp, synthetic construct
  source 1..20: mol_type = other DNA
tcatatgtaaatccaaaagc

SEQ ID NO: 801 - DNA, 20 bp, synthetic construct
  source 1..20: mol_type = other DNA
cattgtaaggataagagata

SEQ ID NO: 802 - DNA, 20 bp, synthetic construct
  source 1..20: mol_type = other DNA
cagtttgaattacattgtaa

SEQ ID NO: 803 - DNA, 20 bp, synthetic construct
  source 1..20: mol_type = other DNA
aattgaacttaaattggcat

SEQ ID NO: 804 - DNA, 20 bp, synthetic construct
  source 1..20: mol_type = other DNA
ctgcataggagtagagtttt

SEQ ID NO: 805 - DNA, 20 bp, synthetic construct
  source 1..20: mol_type = other DNA
aagatggaatttgcgacatc

SEQ ID NO: 806 - DNA, 20 bp, synthetic construct
  source 1..20: mol_type = other DNA
acataaaaatgtataaatcc

SEQ ID NO: 807 - DNA, 20 bp, synthetic construct
  source 1..20: mol_type = other DNA
actgataaaggtaagcacat

SEQ ID NO: 808 - DNA, 20 bp, synthetic construct
  source 1..20: mol_type = other DNA
cagagaggagagaaggacaa

SEQ ID NO: 809 - DNA, 20 bp, synthetic construct
  source 1..20: mol_type = other DNA
ggctaggaaaattctcctgg

SEQ ID NO: 810 - DNA, 20 bp, synthetic construct
  source 1..20: mol_type = other DNA
agggagagctgtcctaaggc

SEQ ID NO: 811 - DNA, 20 bp, synthetic construct
  source 1..20: mol_type = other DNA
gatatccagggagagctgtc

SEQ ID NO: 812 - DNA, 20 bp, synthetic construct
  source 1..20: mol_type = other DNA
ttgaagggaaaattattaat

SEQ ID NO: 813 - DNA, 20 bp, synthetic construct
  source 1..20: mol_type = other DNA
agctggacggacagtgttgc

SEQ ID NO: 814 - DNA, 20 bp, synthetic construct
  source 1..20: mol_type = other DNA
caagacatgctagggactct

SEQ ID NO: 815 - DNA, 20 bp, synthetic construct
  source 1..20: mol_type = other DNA
ccaagacatgctagggactc

SEQ ID NO: 816 - DNA, 20 bp, synthetic construct
  source 1..20: mol_type = other DNA
gccacagtccaagacatgct

SEQ ID NO: 817 - DNA, 20 bp, synthetic construct
  source 1..20: mol_type = other DNA
gcagataatctgaagataga

SEQ ID NO: 818 - DNA, 20 bp, synthetic construct
  source 1..20: mol_type = other DNA
tttattacaaactgaaagag

SEQ ID NO: 819 - DNA, 20 bp, synthetic construct
  source 1..20: mol_type = other DNA
ggtcagataatgagggcctt

SEQ ID NO: 820 - DNA, 20 bp, synthetic construct
  source 1..20: mol_type = other DNA
aggataggtgtatgtgagtg

SEQ ID NO: 821 - DNA, 20 bp, synthetic construct
  source 1..20: mol_type = other DNA
atgaaggtcaagccgaatct

SEQ ID NO: 822 - DNA, 20 bp, synthetic construct
  source 1..20: mol_type = other DNA
aaaagaagtatgtgaaagta

SEQ ID NO: 823 - DNA, 20 bp, synthetic construct
  source 1..20: mol_type = other DNA
tgtctctaatcctattccaa

SEQ ID NO: 824 - DNA, 20 bp, synthetic construct
  source 1..20: mol_type = other DNA
agtcttcatgatttggtaaa

SEQ ID NO: 825 - DNA, 20 bp, synthetic construct
  source 1..20: mol_type = other DNA
agtaagaggcagaattatgt

SEQ ID NO: 826 - DNA, 20 bp, synthetic construct
  source 1..20: mol_type = other DNA
gggcagcaacagctcttgaa

SEQ ID NO: 827 - DNA, 20 bp, synthetic construct
  source 1..20: mol_type = other DNA
taataattaacagtgactgg

SEQ ID NO: 828 - DNA, 20 bp, synthetic construct
  source 1..20: mol_type = other DNA
aagtcattccccaccctggc

SEQ ID NO: 829 - DNA, 20 bp, synthetic construct
  source 1..20: mol_type = other DNA
tccagcagggtgtattccag

SEQ ID NO: 830 - DNA, 20 bp, synthetic construct
  source 1..20: mol_type = other DNA
tcagctgtggtttccagcag

SEQ ID NO: 831 - DNA, 20 bp, synthetic construct
  source 1..20: mol_type = other DNA
gcttagagaatctcagctgt

SEQ ID NO: 832 - DNA, 20 bp, synthetic construct
  source 1..20: mol_type = other DNA
ggttggaagctgccagctta

SEQ ID NO: 833 - DNA, 20 bp, synthetic construct
  source 1..20: mol_type = other DNA
aatggactgccggcctggag

SEQ ID NO: 834 - DNA, 20 bp, synthetic construct
  source 1..20: mol_type = other DNA
tgaactacttggagaccttc

SEQ ID NO: 835 - DNA, 20 bp, synthetic construct
  source 1..20: mol_type = other DNA
agtgaactacttggagacct

SEQ ID NO: 836 - DNA, 20 bp, synthetic construct
  source 1..20: mol_type = other DNA
tcttttattaaacctagttt

SEQ ID NO: 837 - DNA, 20 bp, synthetic construct
  source 1..20: mol_type = other DNA
ttagctagctgtgggtttgc

SEQ ID NO: 838 - DNA, 20 bp, synthetic construct
  source 1..20: mol_type = other DNA
acaagagcagacatcttttt

SEQ ID NO: 839 - DNA, 20 bp, synthetic construct
  source 1..20: mol_type = other DNA
tgtagcttttctaaaattct

SEQ ID NO: 840 - DNA, 20 bp, synthetic construct
  source 1..20: mol_type = other DNA
gtatattgtagcttttctaa

SEQ ID NO: 841 - DNA, 20 bp, synthetic construct
  source 1..20: mol_type = other DNA
cttgatggctgtagcttggt

SEQ ID NO: 842 - DNA, 20 bp, synthetic construct
  source 1..20: mol_type = other DNA
tttctggattctcagtctta

SEQ ID NO: 843 - DNA, 20 bp, synthetic construct
  source 1..20: mol_type = other DNA
tgcattggtatctgtatatc

SEQ ID NO: 844 - DNA, 20 bp, synthetic construct
  source 1..20: mol_type = other DNA
gtttcctatttcatccattt

SEQ ID NO: 845 - DNA, 20 bp, synthetic construct
  source 1..20: mol_type = other DNA
ctggagtgtaagtaaattca

SEQ ID NO: 846 - DNA, 20 bp, synthetic construct
  source 1..20: mol_type = other DNA
atactctttccacatttcag

SEQ ID NO: 847 - DNA, 20 bp, synthetic construct
  source 1..20: mol_type = other DNA
tcctcttgatactctttcca

SEQ ID NO: 848 - DNA, 20 bp, synthetic construct
  source 1..20: mol_type = other DNA
cttagggtctcctcttgata

SEQ ID NO: 849 - DNA, 20 bp, synthetic construct
  source 1..20: mol_type = other DNA
cagagtgtcttagggtctcc

SEQ ID NO: 850 - DNA, 20 bp, synthetic construct
  source 1..20: mol_type = other DNA
atatttctcaaatactcttc

SEQ ID NO: 851 - DNA, 20 bp, synthetic construct
  source 1..20: mol_type = other DNA
tgtgctagaacactatcttg

SEQ ID NO: 852 - DNA, 20 bp, synthetic construct
  source 1..20: mol_type = other DNA
tgactctcatctccctcttc

SEQ ID NO: 853 - DNA, 20 bp, synthetic construct
  source 1..20: mol_type = other DNA
ccctgactctcatctccctc

SEQ ID NO: 854 - DNA, 20 bp, synthetic construct
  source 1..20: mol_type = other DNA
ccttccttctttatactgcc

SEQ ID NO: 855 - DNA, 20 bp, synthetic construct
  source 1..20: mol_type = other DNA
catcaaaatctctcattcct

SEQ ID NO: 856 - DNA, 20 bp, synthetic construct
  source 1..20: mol_type = other DNA
aatcatcaaaatctctcatt

SEQ ID NO: 857 - DNA, 20 bp, synthetic construct
  source 1..20: mol_type = other DNA
ccccaatcatcaaaatctct

SEQ ID NO: 858 - DNA, 20 bp, synthetic construct
  source 1..20: mol_type = other DNA
tagtcagtagtcctaaaaac

SEQ ID NO: 859 - DNA, 20 bp, synthetic construct
  source 1..20: mol_type = other DNA
agacctctgtctctgggatt

SEQ ID NO: 860 - DNA, 20 bp, synthetic construct
  source 1..20: mol_type = other DNA
aaagtccttacctgttcttg

SEQ ID NO: 861 - DNA, 20 bp, synthetic construct
  source 1..20: mol_type = other DNA
ttcaccgaaagtacagtctt

SEQ ID NO: 862 - DNA, 20 bp, synthetic construct
  source 1..20: mol_type = other DNA
tagtttcaccgaaagtacag

SEQ ID NO: 863 - DNA, 20 bp, synthetic construct
  source 1..20: mol_type = other DNA
aagtcttttctcccctcccc

SEQ ID NO: 864 - DNA, 20 bp, synthetic construct
  source 1..20: mol_type = other DNA
tcaacagtgttagtgtgtaa

SEQ ID NO: 865 - DNA, 20 bp, synthetic construct
  source 1..20: mol_type = other DNA
ccttttacctcaacagtgtt

SEQ ID NO: 866 - DNA, 20 bp, synthetic construct
  source 1..20: mol_type = other DNA
agactagtccctgtgtagtc

SEQ ID NO: 867 - DNA, 20 bp, synthetic construct
  source 1..20: mol_type = other DNA
ccaagactagtccctgtgta

SEQ ID NO: 868 - DNA, 20 bp, synthetic construct
  source 1..20: mol_type = other DNA
aactgtcagaggaagaaatg

SEQ ID NO: 869 - DNA, 20 bp, synthetic construct
  source 1..20: mol_type = other DNA
cgaacagaacttgccgatgt

SEQ ID NO: 870 - DNA, 20 bp, synthetic construct
  source 1..20: mol_type = other DNA
ttgtatagggagatgataga

SEQ ID NO: 871 - DNA, 20 bp, synthetic construct
  source 1..20: mol_type = other DNA
taaccttttattattataga

SEQ ID NO: 872 - DNA, 20 bp, synthetic construct
  source 1..20: mol_type = other DNA
taaactaaagtaactggttt

SEQ ID NO: 873 - DNA, 20 bp, synthetic construct
  source 1..20: mol_type = other DNA
ccaggaagctctggagggaa

SEQ ID NO: 874 - DNA, 20 bp, synthetic construct
  source 1..20: mol_type = other DNA
actctattatatattttggt

SEQ ID NO: 875 - DNA, 20 bp, synthetic construct
  source 1..20: mol_type = other DNA
gttataaaagtacttttttt

SEQ ID NO: 876 - DNA, 20 bp, synthetic construct
  source 1..20: mol_type = other DNA
ggatacttcctctaccccaa

SEQ ID NO: 877 - DNA, 20 bp, synthetic construct
  source 1..20: mol_type = other DNA
acagtggatacttcctctac

SEQ ID NO: 878 - DNA, 20 bp, synthetic construct
  source 1..20: mol_type = other DNA
ctgccttttcattactattt

SEQ ID NO: 879 - DNA, 20 bp, synthetic construct
  source 1..20: mol_type = other DNA
gttttaaagtggtaattgaa

SEQ ID NO: 880 - DNA, 20 bp, synthetic construct
  source 1..20: mol_type = other DNA
tcatcatcaacctaaccgag

SEQ ID NO: 881 - DNA, 20 bp, synthetic construct
  source 1..20: mol_type = other DNA
ccatcttggaaccggatgac

SEQ ID NO: 882 - DNA, 20 bp, synthetic construct
  source 1..20: mol_type = other DNA
gtaattgaggtggccatatc

SEQ ID NO: 883 - DNA, 20 bp, synthetic construct
  source 1..20: mol_type = other DNA
gagtcctaaatgtctcatac

SEQ ID NO: 884 - DNA, 20 bp, synthetic construct
  source 1..20: mol_type = other DNA
ggttttagtccactggttca

SEQ ID NO: 885 - DNA, 20 bp, synthetic construct
  source 1..20: mol_type = other DNA
ctagtcatgtatctacagcc

SEQ ID NO: 886 - DNA, 20 bp, synthetic construct
  source 1..20: mol_type = other DNA
gtatatggcttacacaggct

SEQ ID NO: 887 - DNA, 20 bp, synthetic construct
  source 1..20: mol_type = other DNA
gagatttcagactacctgta

SEQ ID NO: 888 - DNA, 20 bp, synthetic construct
  source 1..20: mol_type = other DNA
attgacccagcccatggcac

SEQ ID NO: 889 - DNA, 20 bp, synthetic construct
  source 1..20: mol_type = other DNA
gcgcattgagcaaaattcca

SEQ ID NO: 890 - DNA, 20 bp, synthetic construct
  source 1..20: mol_type = other DNA
gcataacgataatcatgtgg

SEQ ID NO: 891 - DNA, 20 bp, synthetic construct
  source 1..20: mol_type = other DNA
ggctataggccatttattca

SEQ ID NO: 892 - DNA, 20 bp, synthetic construct
  source 1..20: mol_type = other DNA
ttgaataactacctaggctc

SEQ ID NO: 893 - DNA, 20 bp, synthetic construct
  source 1..20: mol_type = other DNA
ccggtgcaggaatccaggat

SEQ ID NO: 894 - DNA, 20 bp, synthetic construct
  source 1..20: mol_type = other DNA
taacaataagataaaggcgc

SEQ ID NO: 895 - DNA, 20 bp, synthetic construct
  source 1..20: mol_type = other DNA
ggcaagcaaagactacaccg

SEQ ID NO: 896 - DNA, 20 bp, synthetic construct
  source 1..20: mol_type = other DNA
gctcctaacattgtatcccc

SEQ ID NO: 897 - DNA, 20 bp, synthetic construct
  source 1..20: mol_type = other DNA
ctctaccaagctatccaagt

SEQ ID NO: 898 - DNA, 20 bp, synthetic construct
  source 1..20: mol_type = other DNA
gtcctattggagggccgcac

SEQ ID NO: 899 - DNA, 20 bp, synthetic construct
  source 1..20: mol_type = other DNA
gtcctccaataagcttctga

SEQ ID NO: 900 - DNA, 20 bp, synthetic construct
  source 1..20: mol_type = other DNA
gggacaatactgcaatcctt

SEQ ID NO: 901 - DNA, 20 bp, synthetic construct
  source 1..20: mol_type = other DNA
agagacctcaagacctatag

SEQ ID NO: 902 - DNA, 20 bp, synthetic construct
  source 1..20: mol_type = other DNA
gactacttcaacctgatacc

SEQ ID NO: 903 - DNA, 20 bp, synthetic construct
  source 1..20: mol_type = other DNA
gggcatcattaacataagct

SEQ ID NO: 904 - DNA, 20 bp, synthetic construct
  source 1..20: mol_type = other DNA
acaaacgggctatgtgagat

SEQ ID NO: 905 - DNA, 20 bp, synthetic construct
  source 1..20: mol_type = other DNA
cactgagtttttgtagttcg

SEQ ID NO: 906 - DNA, 20 bp, synthetic construct
  source 1..20: mol_type = other DNA
ggcagttgtgatagtcaaca

SEQ ID NO: 907 - DNA, 20 bp, synthetic construct
  source 1..20: mol_type = other DNA
tagaggccctcttgtttcaa

SEQ ID NO: 908 - DNA, 20 bp, synthetic construct
  source 1..20: mol_type = other DNA
ggattttattggtcatctcg

SEQ ID NO: 909 - DNA, 20 bp, synthetic construct
  source 1..20: mol_type = other DNA
gtagttacttatactggttc

SEQ ID NO: 910 - DNA, 20 bp, synthetic construct
  source 1..20: mol_type = other DNA
gtgggttcctgatggagtcc

SEQ ID NO: 911 - DNA, 20 bp, synthetic construct
  source 1..20: mol_type = other DNA
ctaggttgcataaagccagg

SEQ ID NO: 912 - DNA, 20 bp, synthetic construct
  source 1..20: mol_type = other DNA
gccttaaaagggttccctgt

SEQ ID NO: 913 - DNA, 20 bp, synthetic construct
  source 1..20: mol_type = other DNA
ggtcatgatgtatgccatta

SEQ ID NO: 914 - DNA, 20 bp, synthetic construct
  source 1..20: mol_type = other DNA
atctagcttgaatggatacc

SEQ ID NO: 915 - DNA, 20 bp, synthetic construct
  source 1..20: mol_type = other DNA
gttctttctcggtcaaacta

SEQ ID NO: 916 - DNA, 20 bp, synthetic construct
  source 1..20: mol_type = other DNA
tacgagttgctggtttcagc

SEQ ID NO: 917 - DNA, 20 bp, synthetic construct
  source 1..20: mol_type = other DNA
ggttagggctatgttatgtt

SEQ ID NO: 918 - DNA, 20 bp, synthetic construct
  source 1..20: mol_type = other DNA
gattccacttgtgtatgcac

SEQ ID NO: 919 - DNA, 20 bp, synthetic construct
  source 1..20: mol_type = other DNA
catatactaaatgttgccga

SEQ ID NO: 920 - DNA, 20 bp, synthetic construct
  source 1..20: mol_type = other DNA
atacagaattcaatggaccc

SEQ ID NO: 921 - DNA, 20 bp, synthetic construct
  source 1..20: mol_type = other DNA
gcctaggaccagttggttca

SEQ ID NO: 922 - DNA, 20 bp, synthetic construct
  source 1..20: mol_type = other DNA
ggctgttgtacattcctagt

SEQ ID NO: 923 - DNA, 20 bp, synthetic construct
  source 1..20: mol_type = other DNA
ccctaagcttagatataccc

SEQ ID NO: 924 - DNA, 20 bp, synthetic construct
  source 1..20: mol_type = other DNA
aggtgggaaaccggttccca

SEQ ID NO: 925 - DNA, 20 bp, synthetic construct
  source 1..20: mol_type = other DNA
ggtcggtccccaccaaagga

SEQ ID NO: 926 - DNA, 20 bp, synthetic construct
  source 1..20: mol_type = other DNA
gccatgtacgaccctcatca

SEQ ID NO: 927 - DNA, 20 bp, synthetic construct
  source 1..20: mol_type = other DNA
tactataatacgggacctca

SEQ ID NO: 928 - DNA, 20 bp, synthetic construct
  source 1..20: mol_type = other DNA
atcacattcaaggtagcccc

SEQ ID NO: 929 - DNA, 20 bp, synthetic construct
  source 1..20: mol_type = other DNA
tgaccagcaataggctctgc

SEQ ID NO: 930 - DNA, 20 bp, synthetic construct
  source 1..20: mol_type = other DNA
actggcctttgggtcggata

SEQ ID NO: 931 - DNA, 20 bp, synthetic construct
  source 1..20: mol_type = other DNA
ggagtccccagataatgcat

SEQ ID NO: 932 - DNA, 20 bp, synthetic construct
  source 1..20: mol_type = other DNA
ggatgggctaagagtcacct

SEQ ID NO: 933 - DNA, 20 bp, synthetic construct
  source 1..20: mol_type = other DNA
ggtattaaggcccttggcca

SEQ ID NO: 934 - DNA, 20 bp, synthetic construct
  source 1..20: mol_type = other DNA
ggcccgatgacaccagccac

SEQ ID NO: 935 - DNA, 20 bp, synthetic construct
  source 1..20: mol_type = other DNA
taacagtcctgtaaccagac

SEQ ID NO: 936 - DNA, 20 bp, synthetic construct
  source 1..20: mol_type = other DNA
ccccctgagatccatgaggt

SEQ ID NO: 937 - DNA, 20 bp, synthetic construct
  source 1..20: mol_type = other DNA
cagttgtgcagttgttaact

SEQ ID NO: 938 - DNA, 20 bp, synthetic construct
  source 1..20: mol_type = other DNA
aaccagatggctgagctatt

SEQ ID NO: 939 - DNA, 20 bp, synthetic construct
  source 1..20: mol_type = other DNA
ttaggccatacctcttccat

SEQ ID NO: 940 - DNA, 20 bp, synthetic construct
  source 1..20: mol_type = other DNA
ttagtctgttgtgtgactcc

SEQ ID NO: 941 - DNA, 20 bp, synthetic construct
  source 1..20: mol_type = other DNA
ccacctaagagctatccgct

SEQ ID NO: 942 - DNA, 20 bp, synthetic construct
  source 1..20: mol_type = other DNA
ggccgaccagctctgaaagt

SEQ ID NO: 943 - DNA, 20 bp, synthetic construct
  source 1..20: mol_type = other DNA
accagggtggtattataaag

SEQ ID NO: 944 - DNA, 20 bp, synthetic construct
  source 1..20: mol_type = other DNA
caggttgtggaggttgttcc

SEQ ID NO: 945 - DNA, 20 bp, synthetic construct
  source 1..20: mol_type = other DNA
gttgtctggcatggagatcc

SEQ ID NO: 946 - DNA, 20 bp, synthetic construct
  source 1..20: mol_type = other DNA
gttgattggaggcactgcag

SEQ ID NO: 947 - DNA, 20 bp, synthetic construct
  source 1..20: mol_type = other DNA
tggtgagtaaatcaatcacg

SEQ ID NO: 948 - DNA, 20 bp, synthetic construct
  source 1..20: mol_type = other DNA
cccttcaacatgtgttaacg

SEQ ID NO: 949 - DNA, 20 bp, synthetic construct
  source 1..20: mol_type = other DNA
cgtggctgtacctgcagtgc

SEQ ID NO: 950 - DNA, 20 bp, synthetic construct
  source 1..20: mol_type = other DNA
gactctgattgattcagtgc

SEQ ID NO: 951 - DNA, 20 bp, synthetic construct
  source 1..20: mol_type = other DNA
agtacaaaccactaagggta

SEQ ID NO: 952 - DNA, 20 bp, synthetic construct
  source 1..20: mol_type = other DNA
gtgccatataatgttgaagc

SEQ ID NO: 953 - DNA, 20 bp, synthetic construct
  source 1..20: mol_type = other DNA
cgtgtctgaactggcctgtg

SEQ ID NO: 954 - DNA, 20 bp, synthetic construct
  source 1..20: mol_type = other DNA
cataacctctcctcgagaca

SEQ ID NO: 955 - DNA, 20 bp, synthetic construct
  source 1..20: mol_type = other DNA
tctgtcacgcttcccttggc

SEQ ID NO: 956 - DNA, 20 bp, synthetic construct
  source 1..20: mol_type = other DNA
tcactggtgtggtatcatgc

SEQ ID NO: 957 - DNA, 20 bp, synthetic construct
  source 1..20: mol_type = other DNA
gattgcatctcttgcagcac

SEQ ID NO: 958 - DNA, 20 bp, synthetic construct
  source 1..20: mol_type = other DNA
ctcacctgtgtatatgagtc

SEQ ID NO: 959 - DNA, 20 bp, synthetic construct
  source 1..20: mol_type = other DNA
acactgttagagcccccaca

SEQ ID NO: 960 - DNA, 20 bp, synthetic construct
  source 1..20: mol_type = other DNA
gcataggaatgggaccatag

SEQ ID NO: 961 - DNA, 20 bp, synthetic construct
  source 1..20: mol_type = other DNA
gcatcatacatagtgtatgc

SEQ ID NO: 962 - DNA, 20 bp, synthetic construct
  source 1..20: mol_type = other DNA
cttgtctcacaattgttacc

SEQ ID NO: 963 - DNA, 20 bp, synthetic construct
  source 1..20: mol_type = other DNA
taactgtagcgcattgagca

SEQ ID NO: 964 - DNA, 20 bp, synthetic construct
  source 1..20: mol_type = other DNA
gctagtcactcattgagaag

SEQ ID NO: 965 - DNA, 20 bp, synthetic construct
  source 1..20: mol_type = other DNA
tagataggctataggccatt

SEQ ID NO: 966 - DNA, 20 bp, synthetic construct
  source 1..20: mol_type = other DNA
gcatatatcttaactcaccc

SEQ ID NO: 967 - DNA, 20 bp, synthetic construct
  source 1..20: mol_type = other DNA
aaaagccggtgcaggaatcc

SEQ ID NO: 968 - DNA, 20 bp, synthetic construct
  source 1..20: mol_type = other DNA
taagtgcccatggcatagtc

SEQ ID NO: 969 - DNA, 20 bp, synthetic construct
  source 1..20: mol_type = other DNA
gagtgctgaagaacatcccc

SEQ ID NO: 970 - DNA, 20 bp, synthetic construct
  source 1..20: mol_type = other DNA
caagtctactaccaataagt

SEQ ID NO: 971 - DNA, 20 bp, synthetic construct
  source 1..20: mol_type = other DNA
cgtcagcattgcttgatctc

SEQ ID NO: 972 - DNA, 20 bp, synthetic construct
  source 1..20: mol_type = other DNA
tatttgtcctattggagggc

SEQ ID NO: 973 - DNA, 20 bp, synthetic construct
  source 1..20: mol_type = other DNA
catggtgagggtctcaatga

SEQ ID NO: 974 - DNA, 20 bp, synthetic construct
  source 1..20: mol_type = other DNA
gagacatgtgccagttcaag

SEQ ID NO: 975 - DNA, 20 bp, synthetic construct
  source 1..20: mol_type = other DNA
ggacactggcacatctatag

SEQ ID NO: 976 - DNA, 20 bp, synthetic construct
  source 1..20: mol_type = other DNA
ctgtataactgattgactac

SEQ ID NO: 977 - DNA, 20 bp, synthetic construct
  source 1..20: mol_type = other DNA
gctcatctatggattgcatt

SEQ ID NO: 978 - DNA, 20 bp, synthetic construct
  source 1..20: mol_type = other DNA
gtacaaacgggctatgtgag

SEQ ID NO: 979 - DNA, 20 bp, synthetic construct
  source 1..20: mol_type = other DNA
agctataggtacctgaagtt

SEQ ID NO: 980 - DNA, 20 bp, synthetic construct
  source 1..20: mol_type = other DNA
cttagcttgcccagagcata

SEQ ID NO: 981 - DNA, 20 bp, synthetic construct
  source 1..20: mol_type = other DNA
gcgaatagaggccctcttgt

SEQ ID NO: 982 - DNA, 20 bp, synthetic construct
  source 1..20: mol_type = other DNA
gatgtgtataggtgttggtc

SEQ ID NO: 983 - DNA, 20 bp, synthetic construct
  source 1..20: mol_type = other DNA
ccattttggtgctataaccc

SEQ ID NO: 984 - DNA, 20 bp, synthetic construct
  source 1..20: mol_type = other DNA
cttataggtgggttcctgat

SEQ ID NO: 985 - DNA, 20 bp, synthetic construct
  source 1..20: mol_type = other DNA
tctctaggttgcataaagcc

SEQ ID NO: 986 - DNA, 20 bp, synthetic construct
  source 1..20: mol_type = other DNA
gcacttgtatagttcatccc

SEQ ID NO: 987 - DNA, 20 bp, synthetic construct
  source 1..20: mol_type = other DNA
atcctgcatccgaggcatga

SEQ ID NO: 988 - DNA, 20 bp, synthetic construct
  source 1..20: mol_type = other DNA
gtggttgccttagtattaca

SEQ ID NO: 989 - DNA, 20 bp, synthetic construct
  source 1..20: mol_type = other DNA
ctgtaaggtgatatctatac

SEQ ID NO: 990 - DNA, 20 bp, synthetic construct
  source 1..20: mol_type = other DNA
tgttcatacgagttgctggt

SEQ ID NO: 991 - DNA, 20 bp, synthetic construct
  source 1..20: mol_type = other DNA
cgcaatgtatcaggcaacag

SEQ ID NO: 992 - DNA, 20 bp, synthetic construct
  source 1..20: mol_type = other DNA
gagggcacaatgattccact

SEQ ID NO: 993 - DNA, 20 bp, synthetic construct
  source 1..20: mol_type = other DNA
ggagttacaagtgtcatata

SEQ ID NO: 994 - DNA, 20 bp, synthetic construct
  source 1..20: mol_type = other DNA
ggctctatgcacttaaggga

SEQ ID NO: 995 - DNA, 20 bp, synthetic construct
  source 1..20: mol_type = other DNA
gatcatgtgcatacccaggg

SEQ ID NO: 996 - DNA, 20 bp, synthetic construct
  source 1..20: mol_type = other DNA
ggtcagattcctaaatacgc

SEQ ID NO: 997 - DNA, 20 bp, synthetic construct
  source 1..20: mol_type = other DNA
gtgtcatatgtagcaattag

SEQ ID NO: 998 - DNA, 20 bp, synthetic construct
  source 1..20: mol_type = other DNA
cacctgtataggagaattgt

SEQ ID NO: 999 - DNA, 20 bp, synthetic construct
  source 1..20: mol_type = other DNA
ccactcccgtggcaacatga

SEQ ID NO: 1000 - DNA, 20 bp, synthetic construct
  source 1..20: mol_type = other DNA
gggtaagaggtcggtcccca

SEQ ID NO: 1001 - DNA, 20 bp, synthetic construct
  source 1..20: mol_type = other DNA
ggaggccatgtacgaccctc

SEQ ID NO: 1002 - DNA, 20 bp, synthetic construct
  source 1..20: mol_type = other DNA
gctgcaatactataatacgg

SEQ ID NO: 1003 - DNA, 20 bp, synthetic construct
  source 1..20: mol_type = other DNA
agctgaggtcaccgatcaga

SEQ ID NO: 1004 - DNA, 20 bp, synthetic construct
  source 1..20: mol_type = other DNA
aacagtgaccagcaataggc

SEQ ID NO: 1005 - DNA, 20 bp, synthetic construct
  source 1..20: mol_type = other DNA
ctaactggcctttgggtcgg

SEQ ID NO: 1006 - DNA, 20 bp, synthetic construct
  source 1..20: mol_type = other DNA
gggaggagtccccagataat

SEQ ID NO: 1007 - DNA, 20 bp, synthetic construct
  source 1..20: mol_type = other DNA
ggcccaagtgatgacatatc

SEQ ID NO: 1008 - DNA, 20 bp, synthetic construct
  source 1..20: mol_type = other DNA
gtaaggcatggtcttccttg

SEQ ID NO: 1009 - DNA, 20 bp, synthetic construct
  source 1..20: mol_type = other DNA
aatatggcccgatgacacca

SEQ ID NO: 1010 - DNA, 20 bp, synthetic construct
  source 1..20: mol_type = other DNA
gcaagattaacagtcctgta

SEQ ID NO: 1011 - DNA, 20 bp, synthetic construct
  source 1..20: mol_type = other DNA
tcagctcaacaccccctgag

SEQ ID NO: 1012 - DNA, 20 bp, synthetic construct
  source 1..20: mol_type = other DNA
agggtcagttgtgcagttgt

SEQ ID NO: 1013 - DNA, 20 bp, synthetic construct
  source 1..20: mol_type = other DNA
gcaaggaatcatgtggctcc

SEQ ID NO: 1014 - DNA, 20 bp, synthetic construct
  source 1..20: mol_type = other DNA
ccaaagatttaggccatacc

SEQ ID NO: 1015 - DNA, 20 bp, synthetic construct
  source 1..20: mol_type = other DNA
gtaaccttcacataagctgc

SEQ ID NO: 1016 - DNA, 20 bp, synthetic construct
  source 1..20: mol_type = other DNA
ggcctagcttccacctaaga

SEQ ID NO: 1017 - DNA, 20 bp, synthetic construct
  source 1..20: mol_type = other DNA
cgctggccgaccagctctga

SEQ ID NO: 1018 - DNA, 20 bp, synthetic construct
  source 1..20: mol_type = other DNA
cgtctaccagggtggtatta

SEQ ID NO: 1019 - DNA, 20 bp, synthetic construct
  source 1..20: mol_type = other DNA
atactccaggttgtggaggt

SEQ ID NO: 1020 - DNA, 20 bp, synthetic construct
  source 1..20: mol_type = other DNA
caaattggtgaatgttcccc

SEQ ID NO: 1021 - DNA, 20 bp, synthetic construct
  source 1..20: mol_type = other DNA
tctcatgaccacctaattga

SEQ ID NO: 1022 - DNA, 20 bp, synthetic construct
  source 1..20: mol_type = other DNA
ccgtgctgctttcttgagtg

SEQ ID NO: 1023 - DNA, 20 bp, synthetic construct
  source 1..20: mol_type = other DNA
acatgcttgcatccaggccc

SEQ ID NO: 1024 - DNA, 20 bp, synthetic construct
  source 1..20: mol_type = other DNA
cggaacccacagtagaggca

SEQ ID NO: 1025 - DNA, 20 bp, synthetic construct
  source 1..20: mol_type = other DNA
ctagggactctgattgattc

SEQ ID NO: 1026 - DNA, 20 bp, synthetic construct
  source 1..20: mol_type = other DNA
accaggcataagtacaaacc

SEQ ID NO: 1027 - DNA, 20 bp, synthetic construct
  source 1..20: mol_type = other DNA
ctgagtgccatataatgttg

SEQ ID NO: 1028 - DNA, 20 bp, synthetic construct
  source 1..20: mol_type = other DNA
aaggctctcagggtaagacg

SEQ ID NO: 1029 - DNA, 20 bp, synthetic construct
  source 1..20: mol_type = other DNA
cgtggaacactgacccatca

SEQ ID NO: 1030 - DNA, 20 bp, synthetic construct
  source 1..20: mol_type = other DNA
cagcatgtaactcatgttgt

SEQ ID NO: 1031 - DNA, 20 bp, synthetic construct
  source 1..20: mol_type = other DNA
gttctaaagtcggttgtgtc

SEQ ID NO: 1032 - DNA, 20 bp, synthetic construct
  source 1..20: mol_type = other DNA
agagtaggccaggtgtcaaa

SEQ ID NO: 1033 - DNA, 20 bp, synthetic construct
  source 1..20: mol_type = other DNA
taccagtgagtaaactggcc

SEQ ID NO: 1034 - DNA, 20 bp, synthetic construct
  source 1..20: mol_type = other DNA
gtactccccatgcacacttg

SEQ ID NO: 1035 - DNA, 20 bp, synthetic construct
  source 1..20: mol_type = other DNA
acggattatcataccctccc

SEQ ID NO: 1036 - DNA, 20 bp, synthetic construct
  source 1..20: mol_type = other DNA
gtcttgtaaacccttaccag

SEQ ID NO: 1037 - DNA, 20 bp, synthetic construct
  source 1..20: mol_type = other DNA
ccgttacttaagctgtggta

SEQ ID NO: 1038 - DNA, 20 bp, synthetic construct
  source 1..20: mol_type = other DNA
tagtgccagtaggacttact

SEQ ID NO: 1039 - DNA, 20 bp, synthetic construct
  source 1..20: mol_type = other DNA
ggacccttaagtcataaaga

SEQ ID NO: 1040 - DNA, 20 bp, synthetic construct
  source 1..20: mol_type = other DNA
gaccaaatgagcatcacatc

SEQ ID NO: 1041 - DNA, 20 bp, synthetic construct
  source 1..20: mol_type = other DNA
cctgtatgtatggcttatgc

SEQ ID NO: 1042 - DNA, 20 bp, synthetic construct
  source 1..20: mol_type = other DNA
atccatagtgatctgggaac

SEQ ID NO: 1043 - DNA, 20 bp, synthetic construct
  source 1..20: mol_type = other DNA
actataattgggaatggtca

SEQ ID NO: 1044 - DNA, 20 bp, synthetic construct
  source 1..20: mol_type = other DNA
gatttgacccttatggagac

SEQ ID NO: 1045 - DNA, 20 bp, synthetic construct
  source 1..20: mol_type = other DNA
tattccctatccagggtaga

SEQ ID NO: 1046 - DNA, 20 bp, synthetic construct
  source 1..20: mol_type = other DNA
ttatcctgttgcaatagaac

SEQ ID NO: 1047 - DNA, 20 bp, synthetic construct
  source 1..20: mol_type = other DNA
attagattaaaatctggccg

SEQ ID NO: 1048 - DNA, 20 bp, synthetic construct
  source 1..20: mol_type = other DNA
gactcataagacaggatgcc

SEQ ID NO: 1049 - DNA, 20 bp, synthetic construct
  source 1..20: mol_type = other DNA
ccagccaggtgtcttatatc

SEQ ID NO: 1050 - DNA, 20 bp, synthetic construct
  source 1..20: mol_type = other DNA
cagttgtgtattgactaagt

SEQ ID NO: 1051 - DNA, 20 bp, synthetic construct
  source 1..20: mol_type = other DNA
aagactatcctggtatgact

SEQ ID NO: 1052 - DNA, 20 bp, synthetic construct
  source 1..20: mol_type = other DNA
tcgatgttcttgcttccctg

SEQ ID NO: 1053 - DNA, 20 bp, synthetic construct
  source 1..20: mol_type = other DNA
ggcagctcctgacaaattag

SEQ ID NO: 1054 - DNA, 20 bp, synthetic construct
  source 1..20: mol_type = other DNA
agacccctcccttaatgtaa

SEQ ID NO: 1055 - DNA, 20 bp, synthetic construct
  source 1..20: mol_type = other DNA
acctgggtattgctgtccaa

SEQ ID NO: 1056 - DNA, 20 bp, synthetic construct
  source 1..20: mol_type = other DNA
ctcaccctttactaaggtgc

SEQ ID NO: 1057 - DNA, 20 bp, synthetic construct
  source 1..20: mol_type = other DNA
ccattggtatgagagatgct

SEQ ID NO: 1058 - DNA, 20 bp, synthetic construct
  source 1..20: mol_type = other DNA
gtcagacttattgaggatgg

SEQ ID NO: 1059 - DNA, 20 bp, synthetic construct
  source 1..20: mol_type = other DNA
ttactcctctggtgtgctga

SEQ ID NO: 1060 - DNA, 20 bp, synthetic construct
  source 1..20: mol_type = other DNA
gcgcacttgggagccagcca

SEQ ID NO: 1061 - DNA, 20 bp, synthetic construct
  source 1..20: mol_type = other DNA
ttactgactggccttaggag

SEQ ID NO: 1062 - DNA, 20 bp, synthetic construct
  source 1..20: mol_type = other DNA
gtagtatgcattgacaagct

SEQ ID NO: 1063 - DNA, 20 bp, synthetic construct
  source 1..20: mol_type = other DNA
gagtatattacctccaggtt

SEQ ID NO: 1064 - DNA, 20 bp, synthetic construct
  source 1..20: mol_type = other DNA
gtattgctgctctagctcta

SEQ ID NO: 1065 - DNA, 20 bp, synthetic construct
  source 1..20: mol_type = other DNA
acggacctcatacagtgagt

SEQ ID NO: 1066 - DNA, 20 bp, synthetic construct
  source 1..20: mol_type = other DNA
gggctcttggaagtctagtt

SEQ ID NO: 1067 - DNA, 20 bp, synthetic construct
  source 1..20: mol_type = other DNA
acatacttggttgcagacgc

SEQ ID NO: 1068 - DNA, 20 bp, synthetic construct
  source 1..20: mol_type = other DNA
taggtttgcggatgccagtg

SEQ ID NO: 1069 - DNA, 20 bp, synthetic construct
  source 1..20: mol_type = other DNA
tacacagtgggatttgcccc

SEQ ID NO: 1070 - DNA, 20 bp, synthetic construct
  source 1..20: mol_type = other DNA
atggcctgactaggcattga

SEQ ID NO: 1071 - DNA, 20 bp, synthetic construct
  source 1..20: mol_type = other DNA
ggttactagggccagagaat

SEQ ID NO: 1072 - DNA, 20 bp, synthetic construct
  source 1..20: mol_type = other DNA
tgttaatagactgcgattat

SEQ ID NO: 1073 - DNA, 20 bp, synthetic construct
  source 1..20: mol_type = other DNA
gggcggagctgcataggagt

SEQ ID NO: 1074 - DNA, 20 bp, synthetic construct
  source 1..20: mol_type = other DNA
acaatggaccacctaagacc

SEQ ID NO: 1075 - DNA, 20 bp, synthetic construct
  source 1..20: mol_type = other DNA
caacccttactctgccaggg

SEQ ID NO: 1076 - DNA, 20 bp, synthetic construct
  source 1..20: mol_type = other DNA
tgtgcaatagcctaaatgcc

SEQ ID NO: 1077 - DNA, 20 bp, synthetic construct
  source 1..20: mol_type = other DNA
ctactatgaagttatgcacc

SEQ ID NO: 1078 - DNA, 20 bp, synthetic construct
  source 1..20: mol_type = other DNA
gttagccttacagcaaatac

SEQ ID NO: 1079 - DNA, 20 bp, synthetic construct
  source 1..20: mol_type = other DNA
tactaattagcaagccactg

SEQ ID NO: 1080 - DNA, 20 bp, synthetic construct
  source 1..20: mol_type = other DNA
gtgtcaaatcaatttgtgcc

SEQ ID NO: 1081 - DNA, 20 bp, synthetic construct
  source 1..20: mol_type = other DNA
ctaagcacatccgatagtca

SEQ ID NO: 1082 - DNA, 20 bp, synthetic construct
  source 1..20: mol_type = other DNA
ggagtgctctttgtggatgc

SEQ ID NO: 1083 - DNA, 20 bp, synthetic construct
  source 1..20: mol_type = other DNA
acccatggctcatcagtggg

SEQ ID NO: 1084 - DNA, 20 bp, synthetic construct
  source 1..20: mol_type = other DNA
ggcagctctttgtaggccca

SEQ ID NO: 1085 - DNA, 20 bp, synthetic construct
  source 1..20: mol_type = other DNA
ggagtgggttcctataagga

SEQ ID NO: 1086 - DNA, 20 bp, synthetic construct
  source 1..20: mol_type = other DNA
ggactaataggcctttctac

SEQ ID NO: 1087 - DNA, 20 bp, synthetic construct
  source 1..20: mol_type = other DNA
ctacagtaccaggtcatttg

SEQ ID NO: 1088 - DNA, 20 bp, synthetic construct
  source 1..20: mol_type = other DNA
caccaccaaccttaaatagt

SEQ ID NO: 1089 - DNA, 20 bp, synthetic construct
  source 1..20: mol_type = other DNA
ccatgccacagattggcttg

SEQ ID NO: 1090 - DNA, 20 bp, synthetic construct
  source 1..20: mol_type = other DNA
cggagccttacgcttggctg

SEQ ID NO: 1091 - DNA, 20 bp, synthetic construct
  source 1..20: mol_type = other DNA
cagtctgtctctgtgtaccg

SEQ ID NO: 1092 - DNA, 20 bp, synthetic construct
  source 1..20: mol_type = other DNA
ggttgacaggacatgctgtc

SEQ ID NO: 1093 - DNA, 20 bp, synthetic construct
  source 1..20: mol_type = other DNA
gttagccgagcattggcttc

SEQ ID NO: 1094 - DNA, 20 bp, synthetic construct
  source 1..20: mol_type = other DNA
cccatggtggtggaatgctg

SEQ ID NO: 1095 - DNA, 20 bp, synthetic construct
  source 1..20: mol_type = other DNA
tcccgcaccatgcattctga

SEQ ID NO: 1096 - DNA, 20 bp, synthetic construct
  source 1..20: mol_type = other DNA
tcagcttccttcagtgggcg

SEQ ID NO: 1097 - DNA, 20 bp, synthetic construct
  source 1..20: mol_type = other DNA
gatctcacacatggcactgc

SEQ ID NO: 1098 - DNA, 20 bp, synthetic construct
  source 1..20: mol_type = other DNA
taccagtaaagggtagtata

SEQ ID NO: 1099 - DNA, 20 bp, synthetic construct
  source 1..20: mol_type = other DNA
gtaaatatacacttgggccc

SEQ ID NO: 1100 - DNA, 20 bp, synthetic construct
  source 1..20: mol_type = other DNA
tagctgaacctgtggctagg

SEQ ID NO: 1101 - DNA, 20 bp, synthetic construct
  source 1..20: mol_type = other DNA
agtgtcaggctgtaagggat

SEQ ID NO: 1102 - DNA, 20 bp, synthetic construct
  source 1..20: mol_type = other DNA
gccataggtttcaggctgat

SEQ ID NO: 1103 - DNA, 20 bp, synthetic construct
  source 1..20: mol_type = other DNA
gagatgggctatgagccatc

SEQ ID NO: 1104 - DNA, 20 bp, synthetic construct
  source 1..20: mol_type = other DNA
ggaccagcgggccgaacgca

SEQ ID NO: 1105 - DNA, 20 bp, synthetic construct
  source 1..20: mol_type = other DNA
atgcaaaggtgtcgatttgt

SEQ ID NO: 1106 - DNA, 20 bp, synthetic construct
  source 1..20: mol_type = other DNA
ggtccatagatgtcagttac

SEQ ID NO: 1107 - DNA, 20 bp, synthetic construct
  source 1..20: mol_type = other DNA
attaatgttctatggtggat

SEQ ID NO: 1108 - DNA, 20 bp, synthetic construct
  source 1..20: mol_type = other DNA
ggagtagaatgcccactggg

SEQ ID NO: 1109 - DNA, 20 bp, synthetic construct
  source 1..20: mol_type = other DNA
gagacctgaatataccttac

SEQ ID NO: 1110 - DNA, 20 bp, synthetic construct
  source 1..20: mol_type = other DNA
ggtatgccaggtttttgaca

SEQ ID NO: 1111 - DNA, 20 bp, synthetic construct
  source 1..20: mol_type = other DNA
ccgtgtaatgacacacctct

SEQ ID NO: 1112 - DNA, 20 bp, synthetic construct
  source 1..20: mol_type = other DNA
aggctatagtcaaagggtgg

SEQ ID NO: 1113 - DNA, 20 bp, synthetic construct
  source 1..20: mol_type = other DNA
gtgtcagtcaatcattgaga

SEQ ID NO: 1114 - DNA, 20 bp, synthetic construct
  source 1..20: mol_type = other DNA
ggtcttatttaccattggca

SEQ ID NO: 1115 - DNA, 20 bp, synthetic construct
  source 1..20: mol_type = other DNA
taacatgttgcttgcactcc

SEQ ID NO: 1116 - DNA, 20 bp, synthetic construct
  source 1..20: mol_type = other DNA
gctcaaactagaatacccca

SEQ ID NO: 1117 - DNA, 20 bp, synthetic construct
  source 1..20: mol_type = other DNA
gtctaggtctcacgctgtgt

SEQ ID NO: 1118 - DNA, 20 bp, synthetic construct
  source 1..20: mol_type = other DNA
gacagtggagtcaagttggt

SEQ ID NO: 1119 - DNA, 20 bp, synthetic construct
  source 1..20: mol_type = other DNA
ggactccacacacctactag

SEQ ID NO: 1120 - DNA, 20 bp, synthetic construct
  source 1..20: mol_type = other DNA
gtgggatggctgtcaatgct

SEQ ID NO: 1121 - DNA, 20 bp, synthetic construct
  source 1..20: mol_type = other DNA
gataattgaggagttcacca

SEQ ID NO: 1122 - DNA, 20 bp, synthetic construct
  source 1..20: mol_type = other DNA
gatccaaacaagcaccctcc

SEQ ID NO: 1123 - DNA, 20 bp, synthetic construct
  source 1..20: mol_type = other DNA
tatcacagttgcttgaccct

SEQ ID NO: 1124 - DNA, 20 bp, synthetic construct
  source 1..20: mol_type = other DNA
gatctattatgagggcatca

SEQ ID NO: 1125 - DNA, 20 bp, synthetic construct
  source 1..20: mol_type = other DNA
agctttagtatgtcgagaac

SEQ ID NO: 1126 - DNA, 20 bp, synthetic construct
  source 1..20: mol_type = other DNA
gtgtggatggtatcctggtc

SEQ ID NO: 1127 - DNA, 20 bp, synthetic construct
  source 1..20: mol_type = other DNA
ggaatgcttgatctgtgggc

SEQ ID NO: 1128 - DNA, 20 bp, synthetic construct
  source 1..20: mol_type = other DNA
gctagactagttgaaatcgg

SEQ ID NO: 1129 - DNA, 20 bp, synthetic construct
  source 1..20: mol_type = other DNA
ccctcccatcagtgaagatt

SEQ ID NO: 1130 - DNA, 20 bp, synthetic construct
  source 1..20: mol_type = other DNA
gctttagaggtcaaatagtg

SEQ ID NO: 1131 - DNA, 20 bp, synthetic construct
  source 1..20: mol_type = other DNA
ctggtcttcctcgaggatag

SEQ ID NO: 1132 - DNA, 20 bp, synthetic construct
  source 1..20: mol_type = other DNA
gtcatctcgggtatataaat

SEQ ID NO: 1133 - DNA, 20 bp, synthetic construct
  source 1..20: mol_type = other DNA
ggacaagtcttatagagaac

SEQ ID NO: 1134 - DNA, 20 bp, synthetic construct
  source 1..20: mol_type = other DNA
gttccaagtatgggctgctg

SEQ ID NO: 1135 - DNA, 20 bp, synthetic construct
  source 1..20: mol_type = other DNA
gtcaacatgtgcttgcaagc

SEQ ID NO: 1136 - DNA, 20 bp, synthetic construct
  source 1..20: mol_type = other DNA
gctgttgatacgctccttca

SEQ ID NO: 1137 - DNA, 20 bp, synthetic construct
  source 1..20: mol_type = other DNA
gaggcactgaagttcactac

SEQ ID NO: 1138 - DNA, 20 bp, synthetic construct
  source 1..20: mol_type = other DNA
agggtcccacttgtttaggt

SEQ ID NO: 1139 - DNA, 20 bp, synthetic construct
  source 1..20: mol_type = other DNA
cgtattaaggtgttgtatga

SEQ ID NO: 1140 - DNA, 20 bp, synthetic construct
  source 1..20: mol_type = other DNA
ccttgtgacaatagtagtga

SEQ ID NO: 1141 - DNA, 20 bp, synthetic construct
  source 1..20: mol_type = other DNA
ggctagatggagcttgagcc

SEQ ID NO: 1142 - DNA, 20 bp, synthetic construct
  source 1..20: mol_type = other DNA
cgtgagctatctgtacaaaa

SEQ ID NO: 1143 - DNA, 20 bp, synthetic construct
  source 1..20: mol_type = other DNA
gtgcataatggtctaccaca

SEQ ID NO: 1144 - DNA, 20 bp, synthetic construct
  source 1..20: mol_type = other DNA
tgaagataggtcagttaacg

SEQ ID NO: 1145 - DNA, 20 bp, synthetic construct
  source 1..20: mol_type = other DNA
gttaagctttcacctatagg

SEQ ID NO: 1146 - DNA, 20 bp, synthetic construct
  source 1..20: mol_type = other DNA
tgatcatatgggtggtcgct

SEQ ID NO: 1147 - DNA, 20 bp, synthetic construct
  source 1..20: mol_type = other DNA
attgtcctcctggtaaccac

SEQ ID NO: 1148 - DNA, 20 bp, synthetic construct
  source 1..20: mol_type = other DNA
gggactggtgccacaccatc

SEQ ID NO: 1149 - DNA, 20 bp, synthetic construct
  source 1..20: mol_type = other DNA
ctaacctggatctcagatag

SEQ ID NO: 1150 - DNA, 20 bp, synthetic construct
  source 1..20: mol_type = other DNA
ctgggccccaattcagtaat

SEQ ID NO: 1151 - DNA, 20 bp, synthetic construct
  source 1..20: mol_type = other DNA
ttggtaaaggagggaatcgg

SEQ ID NO: 1152 - DNA, 20 bp, synthetic construct
  source 1..20: mol_type = other DNA
tccaggatatatgttagtcc

SEQ ID NO: 1153 - DNA, 20 bp, synthetic construct
  source 1..20: mol_type = other DNA
tagctacaataagttgtagc

SEQ ID NO: 1154 - DNA, 20 bp, synthetic construct
  source 1..20: mol_type = other DNA
gagggccatgttaaaggcct

SEQ ID NO: 1155 - DNA, 20 bp, synthetic construct
  source 1..20: mol_type = other DNA
ttttggtaggtaactacggg

SEQ ID NO: 1156 - DNA, 20 bp, synthetic construct
  source 1..20: mol_type = other DNA
tgtagctcagctcaatgtgt

SEQ ID NO: 1157 - DNA, 20 bp, synthetic construct
  source 1..20: mol_type = other DNA
gaactgcactgggttgtctc

SEQ ID NO: 1158 - DNA, 20 bp, synthetic construct
  source 1..20: mol_type = other DNA
gtattgcactcacatactgt

SEQ ID NO: 1159 - DNA, 20 bp, synthetic construct
  source 1..20: mol_type = other DNA
agccaatgcgcaagaaaagt

SEQ ID NO: 1160 - DNA, 20 bp, synthetic construct
  source 1..20: mol_type = other DNA
cataggcataaagcctccta

SEQ ID NO: 1161 - DNA, 20 bp, synthetic construct
  source 1..20: mol_type = other DNA
tcccagaaatggtcctcgca

SEQ ID NO: 1162 - DNA, 20 bp, synthetic construct
  source 1..20: mol_type = other DNA
atgtgggtctgcaccaagtt

SEQ ID NO: 1163 - DNA, 20 bp, synthetic construct
  source 1..20: mol_type = other DNA
ggtgaactcctgtgactgat

SEQ ID NO: 1164 - DNA, 20 bp, synthetic construct
  source 1..20: mol_type = other DNA
gtggagtaggtatattagtc

SEQ ID NO: 1165 - DNA, 20 bp, synthetic construct
  source 1..20: mol_type = other DNA
gtattcctgaagtagtcctg

SEQ ID NO: 1166 - DNA, 20 bp, synthetic construct
  source 1..20: mol_type = other DNA
agaaattgggccgcctctgt

SEQ ID NO: 1167 - DNA, 20 bp, synthetic construct
  source 1..20: mol_type = other DNA
gtgcttagtgaactgtgggc

SEQ ID NO: 1168 - DNA, 20 bp, synthetic construct
  source 1..20: mol_type = other DNA
ccggcatgcatcagctctga

SEQ ID NO: 1169 - DNA, 20 bp, synthetic construct
  source 1..20: mol_type = other DNA
taagaagcttgcctttcgat

SEQ ID NO: 1170 - DNA, 20 bp, synthetic construct
  source 1..20: mol_type = other DNA
gcagtgctactgtgccctta

SEQ ID NO: 1171 - DNA, 20 bp, synthetic construct
  source 1..20: mol_type = other DNA
tccagccctcagtatataga

SEQ ID NO: 1172 - DNA, 20 bp, synthetic construct
  source 1..20: mol_type = other DNA
ccgaagtggaagtagtcatg

SEQ ID NO: 1173 - DNA, 20 bp, synthetic construct
  source 1..20: mol_type = other DNA
tgaatgccaccgtgattgca

SEQ ID NO: 1174 - DNA, 20 bp, synthetic construct
  source 1..20: mol_type = other DNA
cgtagtgtcatcaccataaa

SEQ ID NO: 1175 - DNA, 20 bp, synthetic construct
  source 1..20: mol_type = other DNA
gttgtgtctgagggatatcc

SEQ ID NO: 1176 - DNA, 20 bp, synthetic construct
  source 1..20: mol_type = other DNA
gccgaatcttgacatacagg

SEQ ID NO: 1177 - DNA, 20 bp, synthetic construct
  source 1..20: mol_type = other DNA
gattaccaaaaagggaccag

SEQ ID NO: 1178 - DNA, 20 bp, synthetic construct
  source 1..20: mol_type = other DNA
ctcctaccaataatggagtc

SEQ ID NO: 1179 - DNA, 20 bp, synthetic construct
  source 1..20: mol_type = other DNA
cggacacactgggaccagcg

SEQ ID NO: 1180 - DNA, 20 bp, synthetic construct
  source 1..20: mol_type = other DNA
gctcctatcaagcttttccc

SEQ ID NO: 1181 - DNA, 20 bp, synthetic construct
  source 1..20: mol_type = other DNA
tgaggtgcattttctagccc

SEQ ID NO: 1182 - DNA, 20 bp, synthetic construct
  source 1..20: mol_type = other DNA
atctatggagtcatctcccc

SEQ ID NO: 1183 - DNA, 20 bp, synthetic construct
  source 1..20: mol_type = other DNA
ggtagaggttaatctatgtc

SEQ ID NO: 1184 - DNA, 20 bp, synthetic construct
  source 1..20: mol_type = other DNA
cgtcggtaaaggaagctact

SEQ ID NO: 1185 - DNA, 20 bp, synthetic construct
  source 1..20: mol_type = other DNA
tcataaggacaaggtatgcc

SEQ ID NO: 1186 - DNA, 20 bp, synthetic construct
  source 1..20: mol_type = other DNA
ggacctcattagatcagtca

SEQ ID NO: 1187 - DNA, 20 bp, synthetic construct
  source 1..20: mol_type = other DNA
ggcagttgagtggtgtcagt

SEQ ID NO: 1188 - DNA, 20 bp, synthetic construct
  source 1..20: mol_type = other DNA
ggattgcatcacatgtgtca

SEQ ID NO: 1189 - DNA, 20 bp, synthetic construct
  source 1..20: mol_type = other DNA
tataagtgtccataaaggtc

SEQ ID NO: 1190 - DNA, 20 bp, synthetic construct
  source 1..20: mol_type = other DNA
ggcattaacatgttgcttgc

SEQ ID NO: 1191 - DNA, 20 bp, synthetic construct
  source 1..20: mol_type = other DNA
gaattgataagtggtcttct

SEQ ID NO: 1192 - DNA, 20 bp, synthetic construct
  source 1..20: mol_type = other DNA
gggaagtctaggtctcacgc

SEQ ID NO: 1193 - DNA, 20 bp, synthetic construct
  source 1..20: mol_type = other DNA
ctacatatgacagtggagtc

SEQ ID NO: 1194 - DNA, 20 bp, synthetic construct
  source 1..20: mol_type = other DNA
tgagtggactccacacacct

SEQ ID NO: 1195 - DNA, 20 bp, synthetic construct
  source 1..20: mol_type = other DNA
gatattgcagtgggatggct

SEQ ID NO: 1196 - DNA, 20 bp, synthetic construct
  source 1..20: mol_type = other DNA
cgtgatagtgctattgtgag

SEQ ID NO: 1197 - DNA, 20 bp, synthetic construct
  source 1..20: mol_type = other DNA
catcgatccaaacaagcacc

SEQ ID NO: 1198 - DNA, 20 bp, synthetic construct
  source 1..20: mol_type = other DNA
gcttagctactcacccctgt

SEQ ID NO: 1199 - DNA, 20 bp, synthetic construct
  source 1..20: mol_type = other DNA
cccacttgatctattatgag

SEQ ID NO: 1200 - DNA, 20 bp, synthetic construct
  source 1..20: mol_type = other DNA
ccctaatatagggcagatga

SEQ ID NO: 1201 - DNA, 20 bp, synthetic construct
  source 1..20: mol_type = other DNA
agtgtggatggtatcctggt

SEQ ID NO: 1202 - DNA, 20 bp, synthetic construct
  source 1..20: mol_type = other DNA
ggatttgagcctgctatgtc

SEQ ID NO: 1203 - DNA, 20 bp, synthetic construct
  source 1..20: mol_type = other DNA
cattcagctagactagttga

SEQ ID NO: 1204 - DNA, 20 bp, synthetic construct
  source 1..20: mol_type = other DNA
tatggccctcccatcagtga

SEQ ID NO: 1205 - DNA, 20 bp, synthetic construct
  source 1..20: mol_type = other DNA
tagattgggctttagaggtc

SEQ ID NO: 1206 - DNA, 20 bp, synthetic construct
  source 1..20: mol_type = other DNA
acatctggtcttcctcgagg

SEQ ID NO: 1207 - DNA, 20 bp, synthetic construct
  source 1..20: mol_type = other DNA
ggtcatctcgggtatataaa

SEQ ID NO: 1208 - DNA, 20 bp, synthetic construct
  source 1..20: mol_type = other DNA
accgaaggagttcctttagc

SEQ ID NO: 1209 - DNA, 20 bp, synthetic construct
  source 1..20: mol_type = other DNA
ggcagttccaagtatgggct

SEQ ID NO: 1210 - DNA, 20 bp, synthetic construct
  source 1..20: mol_type = other DNA
gtggagccagctgtcaacat

SEQ ID NO: 1211 - DNA, 20 bp, synthetic construct
  source 1..20: mol_type = other DNA
tggaatgtatcctgtacggg

SEQ ID NO: 1212 - DNA, 20 bp, synthetic construct
  source 1..20: mol_type = other DNA
gtgttatactattgtggtgc

SEQ ID NO: 1213 - DNA, 20 bp, synthetic construct
  source 1..20: mol_type = other DNA
gtttgttagggtcccacttg

SEQ ID NO: 1214 - DNA, 20 bp, synthetic construct
  source 1..20: mol_type = other DNA
tctgctattgttggatatcg

SEQ ID NO: 1215 - DNA, 20 bp, synthetic construct
  source 1..20: mol_type = other DNA
atggttagtttaagaaatcg

SEQ ID NO: 1216 - DNA, 20 bp, synthetic construct
  source 1..20: mol_type = other DNA
gagtcctggttgatgtggtg

SEQ ID NO: 1217 - DNA, 20 bp, synthetic construct
  source 1..20: mol_type = other DNA
acgggcatgctttataatta

SEQ ID NO: 1218 - DNA, 20 bp, synthetic construct
  source 1..20: mol_type = other DNA
aacctttgtgcataatggtc

SEQ ID NO: 1219 - DNA, 20 bp, synthetic construct
  source 1..20: mol_type = other DNA
cactctataggttcaagcag

SEQ ID NO: 1220 - DNA, 20 bp, synthetic construct
  source 1..20: mol_type = other DNA
ccagggtaggattcatggtc

SEQ ID NO: 1221 - DNA, 20 bp, synthetic construct
  source 1..20: mol_type = other DNA
tgttgtatgcaggttcatca

SEQ ID NO: 1222 - DNA, 20 bp, synthetic construct
  source 1..20: mol_type = other DNA
gatacattgtcctcctggta

SEQ ID NO: 1223 - DNA, 20 bp, synthetic construct
  source 1..20: mol_type = other DNA
acacttgaagctgttgagtc

SEQ ID NO: 1224 - DNA, 20 bp, synthetic construct
  source 1..20: mol_type = other DNA
cgtgaaggaatgatctctct

SEQ ID NO: 1225 - DNA, 20 bp, synthetic construct
  source 1..20: mol_type = other DNA
cctaatctatgctgggcccc

SEQ ID NO: 1226 - DNA, 20 bp, synthetic construct
  source 1..20: mol_type = other DNA
gagagtaagttactagaggc

SEQ ID NO: 1227 - DNA, 20 bp, synthetic construct
  source 1..20: mol_type = other DNA
tgggcagattgatcacctag

SEQ ID NO: 1228 - DNA, 20 bp, synthetic construct
  source 1..20: mol_type = other DNA
tactaggcctgctctactgg

SEQ ID NO: 1229 - DNA, 20 bp, synthetic construct
  source 1..20: mol_type = other DNA
ttagaggtcaagccctgtgt

SEQ ID NO: 1230 - DNA, 20 bp, synthetic construct
  source 1..20: mol_type = other DNA
gggtcggatatagcttttac

SEQ ID NO: 1231 - DNA, 20 bp, synthetic construct
  source 1..20: mol_type = other DNA
gcttatgtagctcagctcaa

SEQ ID NO: 1232 - DNA, 20 bp, synthetic construct
  source 1..20: mol_type = other DNA
ttgggacatcccaaagttac

SEQ ID NO: 1233 - DNA, 20 bp, synthetic construct
  source 1..20: mol_type = other DNA
ggaacatcatgttagccatc

SEQ ID NO: 1234 - DNA, 20 bp, synthetic construct
  source 1..20: mol_type = other DNA
gatgcatcaagccaatgcgc

SEQ ID NO: 1235 - DNA, 20 bp, synthetic construct
  source 1..20: mol_type = other DNA
gaacctctacagagagacta

SEQ ID NO: 1236 - DNA, 20 bp, synthetic construct
  source 1..20: mol_type = other DNA
gttctgtatacaccatccca

SEQ ID NO: 1237 - DNA, 20 bp, synthetic construct
  source 1..20: mol_type = other DNA
gcaaaatgtgggtctgcacc

SEQ ID NO: 1238 - DNA, 20 bp, synthetic construct
  source 1..20: mol_type = other DNA
taactggtgaactcctgtga

SEQ ID NO: 1239 - DNA, 20 bp, synthetic construct
  source 1..20: mol_type = other DNA
ccccagaagtggagtaggta

SEQ ID NO: 1240 - DNA, 20 bp, synthetic construct
  source 1..20: mol_type = other DNA
cctcaagatcaacagacccc

SEQ ID NO: 1241 - DNA, 20 bp, synthetic construct
  source 1..20: mol_type = other DNA
cagtcaggtacaggtgttgg

SEQ ID NO: 1242 - DNA, 20 bp, synthetic construct
  source 1..20: mol_type = other DNA
gtgagggtgcttagtgaact

SEQ ID NO: 1243 - DNA, 20 bp, synthetic construct
  source 1..20: mol_type = other DNA
gtcagaacaatccggcatgc

SEQ ID NO: 1244 - DNA, 20 bp, synthetic construct
  source 1..20: mol_type = other DNA
gagtgctccacacttctgtc

SEQ ID NO: 1245 - DNA, 20 bp, synthetic construct
  source 1..20: mol_type = other DNA
gcttgcagtgctactgtgcc

SEQ ID NO: 1246 - DNA, 20 bp, synthetic construct
  source 1..20: mol_type = other DNA
tcgatacctgcttttgtgac

SEQ ID NO: 1247 - DNA, 20 bp, synthetic construct
  source 1..20: mol_type = other DNA
cataaccgaagtggaagtag

SEQ ID NO: 1248 - DNA, 20 bp, synthetic construct
  source 1..20: mol_type = other DNA
tacttcatgactgcctagtt

SEQ ID NO: 1249 - DNA, 20 bp, synthetic construct
  source 1..20: mol_type = other DNA
aagaagggcatatatctacg

SEQ ID NO: 1250 - DNA, 20 bp, synthetic construct
  source 1..20: mol_type = other DNA
cggacagtgttgctgttagg

SEQ ID NO: 1251 - DNA, 20 bp, synthetic construct
  source 1..20: mol_type = other DNA
ggtcaagccgaatcttgaca

SEQ ID NO: 1252 - DNA, 20 bp, synthetic construct
  source 1..20: mol_type = other DNA
tgactgggtaaggcaggatc

SEQ ID NO: 1253 - DNA, 20 bp, synthetic construct
  source 1..20: mol_type = other DNA
agtactcctaccaataatgg

SEQ ID NO: 1254 - DNA, 20 bp, synthetic construct
  source 1..20: mol_type = other DNA
ggcagtgcattcaactgtag

SEQ ID NO: 1255 - DNA, 20 bp, synthetic construct
  source 1..20: mol_type = other DNA
cgtgggttagtccaagtaac

SEQ ID NO: 1256 - DNA, 20 bp, synthetic construct
  source 1..20: mol_type = other DNA
gcccattatgtagtctatag

SEQ ID NO: 1257 - DNA, 20 bp, synthetic construct
  source 1..20: mol_type = other DNA
gacgaaggcagtcactctgc

SEQ ID NO: 1258 - DNA, 20 bp, synthetic construct
  source 1..20: mol_type = other DNA
gggagaactacatctcacct

SEQ ID NO: 1259 - DNA, 20 bp, synthetic construct
  source 1..20: mol_type = other DNA
ccccattaccacggtctctt

SEQ ID NO: 1260 - DNA, 20 bp, synthetic construct
  source 1..20: mol_type = other DNA
agcagtctttatctacaggc

SEQ ID NO: 1261 - DNA, 20 bp, synthetic construct
  source 1..20: mol_type = other DNA
ttgatgacctggtaagggat

SEQ ID NO: 1262 - DNA, 20 bp, synthetic construct
  source 1..20: mol_type = other DNA
cgcaataagattccattgcc

SEQ ID NO: 1263 - DNA, 20 bp, synthetic construct
  source 1..20: mol_type = other DNA
acgataactgtagcgcattg

SEQ ID NO: 1264 - DNA, 20 bp, synthetic construct
  source 1..20: mol_type = other DNA
gcaagtatgctagtcactca

SEQ ID NO: 1265 - DNA, 20 bp, synthetic construct
  source 1..20: mol_type = other DNA
ccattagataggctataggc

SEQ ID NO: 1266 - DNA, 20 bp, synthetic construct
  source 1..20: mol_type = other DNA
tcgccgctgattttaaagat

SEQ ID NO: 1267 - DNA, 20 bp, synthetic construct
  source 1..20: mol_type = other DNA
ggttcaaaagccggtgcagg

SEQ ID NO: 1268 - DNA, 20 bp, synthetic construct
  source 1..20: mol_type = other DNA
gttgttcttaagtgcccatg

SEQ ID NO: 1269 - DNA, 20 bp, synthetic construct
  source 1..20: mol_type = other DNA
gcactttgcatgagaatagg

SEQ ID NO: 1270 - DNA, 20 bp, synthetic construct
  source 1..20: mol_type = other DNA
tccagacaagtctactacca

SEQ ID NO: 1271 - DNA, 20 bp, synthetic construct
  source 1..20: mol_type = other DNA
tctactccttgctacaaacg

SEQ ID NO: 1272 - DNA, 20 bp, synthetic construct
  source 1..20: mol_type = other DNA
gggatccccaaatagagcca

SEQ ID NO: 1273 - DNA, 20 bp, synthetic construct
  source 1..20: mol_type = other DNA
caatagtgtaggtgacatgg

SEQ ID NO: 1274 - DNA, 20 bp, synthetic construct
  source 1..20: mol_type = other DNA
gcatgtgggcctctattaag

SEQ ID NO: 1275 - DNA, 20 bp, synthetic construct
  source 1..20: mol_type = other DNA
gtatggtatcttgcagtagc

SEQ ID NO: 1276 - DNA, 20 bp, synthetic construct
  source 1..20: mol_type = other DNA
atagccctttcagcacactt

SEQ ID NO: 1277 - DNA, 20 bp, synthetic construct
  source 1..20: mol_type = other DNA
gctggcaatatgtcaacctt

SEQ ID NO: 1278 - DNA, 20 bp, synthetic construct
  source 1..20: mol_type = other DNA
tgtacaaacgggctatgtga

SEQ ID NO: 1279 - DNA, 20 bp, synthetic construct
  source 1..20: mol_type = other DNA
catatgaagctataggtacc

SEQ ID NO: 1280 - DNA, 20 bp, synthetic construct
  source 1..20: mol_type = other DNA
ggtagttcacaactcttcct

SEQ ID NO: 1281 - DNA, 20 bp, synthetic construct
  source 1..20: mol_type = other DNA
tctgcgaatagaggccctct

SEQ ID NO: 1282 - DNA, 20 bp, synthetic construct
  source 1..20: mol_type = other DNA
gacacgctgactatgatgtg

SEQ ID NO: 1283 - DNA, 20 bp, synthetic construct
  source 1..20: mol_type = other DNA
cttgcccatggatggttgtc

SEQ ID NO: 1284 - DNA, 20 bp, synthetic construct
  source 1..20: mol_type = other DNA
gtggcttataggtgggttcc

SEQ ID NO: 1285 - DNA, 20 bp, synthetic construct
  source 1..20: mol_type = other DNA
ggttgtatgccttctgcatt

SEQ ID NO: 1286 - DNA, 20 bp, synthetic construct
  source 1..20: mol_type = other DNA
ccttgcagcacttgtatagt

SEQ ID NO: 1287 - DNA, 20 bp, synthetic construct
  source 1..20: mol_type = other DNA
actatcctgcatccgaggca

SEQ ID NO: 1288 - DNA, 20 bp, synthetic construct
  source 1..20: mol_type = other DNA
atataattgagggccaccat

SEQ ID NO: 1289 - DNA, 20 bp, synthetic construct
  source 1..20: mol_type = other DNA
cctttagagggatttgtgta

SEQ ID NO: 1290 - DNA, 20 bp, synthetic construct
  source 1..20: mol_type = other DNA
cttaacatgttcatacgagt

SEQ ID NO: 1291 - DNA, 20 bp, synthetic construct
  source 1..20: mol_type = other DNA
gctgatcacattacccatcc

SEQ ID NO: 1292 - DNA, 20 bp, synthetic construct
  source 1..20: mol_type = other DNA
gatgtatcacgcaaacaatt

SEQ ID NO: 1293 - DNA, 20 bp, synthetic construct
  source 1..20: mol_type = other DNA
accaaggagttacaagtgtc

SEQ ID NO: 1294 - DNA, 20 bp, synthetic construct
  source 1..20: mol_type = other DNA
ggccaggatggtcaacctta

SEQ ID NO: 1295 - DNA, 20 bp, synthetic construct
  source 1..20: mol_type = other DNA
tttttgccacagccgcttgg

SEQ ID NO: 1296 - DNA, 20 bp, synthetic construct
  source 1..20: mol_type = other DNA
cgaataattgcatgccaact

SEQ ID NO: 1297 - DNA, 20 bp, synthetic construct
  source 1..20: mol_type = other DNA
ggtttagtgtcatatgtagc

SEQ ID NO: 1298 - DNA, 20 bp, synthetic construct
  source 1..20: mol_type = other DNA
gcacacacctgtataggaga

SEQ ID NO: 1299 - DNA, 20 bp, synthetic construct
  source 1..20: mol_type = other DNA
cctgccactcccgtggcaac

SEQ ID NO: 1300 - DNA, 20 bp, synthetic construct
  source 1..20: mol_type = other DNA
ttatgggtaagaggtcggtc

SEQ ID NO: 1301 - DNA, 20 bp, synthetic construct
  source 1..20: mol_type = other DNA
ggtatggaggccatgtacga

SEQ ID NO: 1302 - DNA, 20 bp, synthetic construct
  source 1..20: mol_type = other DNA
gcgcccggcaagagattcac

SEQ ID NO: 1303 - DNA, 20 bp, synthetic construct
  source 1..20: mol_type = other DNA
ttgcataataggaggtcctt

SEQ ID NO: 1304 - DNA, 20 bp, synthetic construct
  source 1..20: mol_type = other DNA
gggcttacaacctctcaatt

SEQ ID NO: 1305 - DNA, 20 bp, synthetic construct
  source 1..20: mol_type = other DNA
cctaactggcctttgggtcg

SEQ ID NO: 1306 - DNA, 20 bp, synthetic construct
  source 1..20: mol_type = other DNA
gtctgcacaggtggcataga

SEQ ID NO: 1307 - DNA, 20 bp, synthetic construct
  source 1..20: mol_type = other DNA
gtccagaggtcatatggccc

SEQ ID NO: 1308 - DNA, 20 bp, synthetic construct
  source 1..20: mol_type = other DNA
gcataagtaaggcatggtct

SEQ ID NO: 1309 - DNA, 20 bp, synthetic construct
  source 1..20: mol_type = other DNA
cttcgggcaaatatggcccg

SEQ ID NO: 1310 - DNA, 20 bp, synthetic construct
  source 1..20: mol_type = other DNA
ggtgctacagtcatactatc

SEQ ID NO: 1311 - DNA, 20 bp, synthetic construct
  source 1..20: mol_type = other DNA
gtgatcagctcaacaccccc

SEQ ID NO: 1312 - DNA, 20 bp, synthetic construct
  source 1..20: mol_type = other DNA
taataaagggtcagttgtgc

SEQ ID NO: 1313 - DNA, 20 bp, synthetic construct
  source 1..20: mol_type = other DNA
cactgcctaagcaaggaatc

SEQ ID NO: 1314 - DNA, 20 bp, synthetic construct
  source 1..20: mol_type = other DNA
tgccccaaagatttaggcca

SEQ ID NO: 1315 - DNA, 20 bp, synthetic construct
  source 1..20: mol_type = other DNA
tcagacatggtaaccttcac

SEQ ID NO: 1316 - DNA, 20 bp, synthetic construct
  source 1..20: mol_type = other DNA
attgcaggcctagcttccac

SEQ ID NO: 1317 - DNA, 20 bp, synthetic construct
  source 1..20: mol_type = other DNA
ggtattgagtaggacttctc

SEQ ID NO: 1318 - DNA, 20 bp, synthetic construct
  source 1..20: mol_type = other DNA
cttaaggaggcaactcctga

SEQ ID NO: 1319 - DNA, 20 bp, synthetic construct
  source 1..20: mol_type = other DNA
atatactccaggttgtggag

SEQ ID NO: 1320 - DNA, 20 bp, synthetic construct
  source 1..20: mol_type = other DNA
gagccaggttcctgttcacg

SEQ ID NO: 1321 - DNA, 20 bp, synthetic construct
  source 1..20: mol_type = other DNA
ccgtctttaggaacttaaat

SEQ ID NO: 1322 - DNA, 20 bp, synthetic construct
  source 1..20: mol_type = other DNA
agcacaacccccgtgctgct

SEQ ID NO: 1323 - DNA, 20 bp, synthetic construct
  source 1..20: mol_type = other DNA
tacccaacatgcttgcatcc

SEQ ID NO: 1324 - DNA, 20 bp, synthetic construct
  source 1..20: mol_type = other DNA
atacacggaacccacagtag

SEQ ID NO: 1325 - DNA, 20 bp, synthetic construct
  source 1..20: mol_type = other DNA
catgctagggactctgattg

SEQ ID NO: 1326 - DNA, 20 bp, synthetic construct
  source 1..20: mol_type = other DNA
gttagaccaggcataagtac

SEQ ID NO: 1327 - DNA, 20 bp, synthetic construct
  source 1..20: mol_type = other DNA
tgcagctgagtgccatataa

SEQ ID NO: 1328 - DNA, 20 bp, synthetic construct
  source 1..20: mol_type = other DNA
actacttggagaccttcacc

SEQ ID NO: 1329 - DNA, 20 bp, synthetic construct
  source 1..20: mol_type = other DNA
gctcctgacaaattagcact

SEQ ID NO: 1330 - DNA, 20 bp, synthetic construct
  source 1..20: mol_type = other DNA
cggatgcagggcacccttgg

SEQ ID NO: 1331 - DNA, 20 bp, synthetic construct
  source 1..20: mol_type = other DNA
catgatataaggagaaacgc

SEQ ID NO: 1332 - DNA, 20 bp, synthetic construct
  source 1..20: mol_type = other DNA
atcttgcggctgtctcccag

SEQ ID NO: 1333 - DNA, 20 bp, synthetic construct
  source 1..20: mol_type = other DNA
tcccatagttatatggctca

SEQ ID NO: 1334 - DNA, 20 bp, synthetic construct
  source 1..20: mol_type = other DNA
ctgcatgttagattgggcat

SEQ ID NO: 1335 - DNA, 20 bp, synthetic construct
  source 1..20: mol_type = other DNA
gctgtgatgctaggatgcat

SEQ ID NO: 1336 - DNA, 20 bp, synthetic construct
  source 1..20: mol_type = other DNA
agacatagaccccagacggt

SEQ ID NO: 1337 - DNA, 20 bp, synthetic construct
  source 1..20: mol_type = other DNA
cccttaccagaatagcatcc

SEQ ID NO: 1338 - DNA, 20 bp, synthetic construct
  source 1..20: mol_type = other DNA
tggtagaccactgattcccc

SEQ ID NO: 1339 - DNA, 20 bp, synthetic construct
  source 1..20: mol_type = other DNA
agcaagggtcttagtgccaa

SEQ ID NO: 1340 - DNA, 20 bp, synthetic construct
  source 1..20: mol_type = other DNA
gtctgtatatttagaccacg

SEQ ID NO: 1341 - DNA, 20 bp, synthetic construct
  source 1..20: mol_type = other DNA
gtcaacattatatcgatgca

SEQ ID NO: 1342 - DNA, 20 bp, synthetic construct
  source 1..20: mol_type = other DNA
gtatggcttatgcatgctat

SEQ ID NO: 1343 - DNA, 20 bp, synthetic construct
  source 1..20: mol_type = other DNA
tgggcaggtcaacttggtat

SEQ ID NO: 1344 - DNA, 20 bp, synthetic construct
  source 1..20: mol_type = other DNA
aaaaggtgattaggcggccg

SEQ ID NO: 1345 - DNA, 20 bp, synthetic construct
  source 1..20: mol_type = other DNA
tgacccttatggagacttat

SEQ ID NO: 1346 - DNA, 20 bp, synthetic construct
  source 1..20: mol_type = other DNA
tccagggtagaagactagca

SEQ ID NO: 1347 - DNA, 20 bp, synthetic construct
  source 1..20: mol_type = other DNA
gcaatagaacagatggccat

SEQ ID NO: 1348 - DNA, 20 bp, synthetic construct
  source 1..20: mol_type = other DNA
gtaccaaagtggctgctcac

SEQ ID NO: 1349 - DNA, 20 bp, synthetic construct
  source 1..20: mol_type = other DNA
actgccctcttcgaagagat

SEQ ID NO: 1350 - DNA, 20 bp, synthetic construct
  source 1..20: mol_type = other DNA
gattatctcagacatgccat

SEQ ID NO: 1351 - DNA, 20 bp, synthetic construct
  source 1..20: mol_type = other DNA
ccttaagcaaggagttcact

SEQ ID NO: 1352 - DNA, 20 bp, synthetic construct
  source 1..20: mol_type = other DNA
atcctggtatgactgtcagt

SEQ ID NO: 1353 - DNA, 20 bp, synthetic construct
  source 1..20: mol_type = other DNA
ggctctcatctaaataagcc

SEQ ID NO: 1354 - DNA, 20 bp, synthetic construct
  source 1..20: mol_type = other DNA
aaccctaaggtgaagtctgt

SEQ ID NO: 1355 - DNA, 20 bp, synthetic construct
  source 1..20: mol_type = other DNA
gggtattgctgtccaaatgg

SEQ ID NO: 1356 - DNA, 20 bp, synthetic construct
  source 1..20: mol_type = other DNA
gtgttatggttcccattcag

SEQ ID NO: 1357 - DNA, 20 bp, synthetic construct
  source 1..20: mol_type = other DNA
cctgctcaaatctgcgaata

SEQ ID NO: 1358 - DNA, 20 bp, synthetic construct
  source 1..20: mol_type = other DNA
gacttattgaggatggtgtg

SEQ ID NO: 1359 - DNA, 20 bp, synthetic construct
  source 1..20: mol_type = other DNA
tgaactcccacaaggtactc

SEQ ID NO: 1360 - DNA, 20 bp, synthetic construct
  source 1..20: mol_type = other DNA
aggcatttggagcattcggg

SEQ ID NO: 1361 - DNA, 20 bp, synthetic construct
  source 1..20: mol_type = other DNA
actttcatcagttagtcagg

SEQ ID NO: 1362 - DNA, 20 bp, synthetic construct
  source 1..20: mol_type = other DNA
cattgacaagctattgcagc

SEQ ID NO: 1363 - DNA, 20 bp, synthetic construct
  source 1..20: mol_type = other DNA
ttttatggcttatagcagcg

SEQ ID NO: 1364 - DNA, 20 bp, synthetic construct
  source 1..20: mol_type = other DNA
cacgcccaaatggaactcta

SEQ ID NO: 1365 - DNA, 20 bp, synthetic construct
  source 1..20: mol_type = other DNA
gtgagttatagagtgttccc

SEQ ID NO: 1366 - DNA, 20 bp, synthetic construct
  source 1..20: mol_type = other DNA
tgggcacttaggagttccta

SEQ ID NO: 1367 - DNA, 20 bp, synthetic construct
  source 1..20: mol_type = other DNA
gctgtatctgtggtttagca

SEQ ID NO: 1368 - DNA, 20 bp, synthetic construct
  source 1..20: mol_type = other DNA
gcggatgccagtggccgaga

SEQ ID NO: 1369 - DNA, 20 bp, synthetic construct
  source 1..20: mol_type = other DNA
gctatacccctaggatcaga

SEQ ID NO: 1370 - DNA, 20 bp, synthetic construct
  source 1..20: mol_type = other DNA
taggcattgaatgagggccc

SEQ ID NO: 1371 - DNA, 20 bp, synthetic construct
  source 1..20: mol_type = other DNA
gtatggacttgtcttatggc

SEQ ID NO: 1372 - DNA, 20 bp, synthetic construct
  source 1..20: mol_type = other DNA
aatagactgcgattatacaa

SEQ ID NO: 1373 - DNA, 20 bp, synthetic construct
  source 1..20: mol_type = other DNA
cgcaattgaacttaaattgg

SEQ ID NO: 1374 - DNA, 20 bp, synthetic construct
  source 1..20: mol_type = other DNA
ggaccacctaagacctcaag

SEQ ID NO: 1375 - DNA, 20 bp, synthetic construct
  source 1..20: mol_type = other DNA
ggctaaagtaatcttatggg

SEQ ID NO: 1376 - DNA, 20 bp, synthetic construct
  source 1..20: mol_type = other DNA
gtgcaatagcctaaatgcca

SEQ ID NO: 1377 - DNA, 20 bp, synthetic construct
  source 1..20: mol_type = other DNA
ggattaggcagcttcactac

SEQ ID NO: 1378 - DNA, 20 bp, synthetic construct
  source 1..20: mol_type = other DNA
gcaaatacaatggtaatcgc

SEQ ID NO: 1379 - DNA, 20 bp, synthetic construct
  source 1..20: mol_type = other DNA
ctggtgtacattggatatga

SEQ ID NO: 1380 - DNA, 20 bp, synthetic construct
  source 1..20: mol_type = other DNA
gcaagaggtactgtaagccc

SEQ ID NO: 1381 - DNA, 20 bp, synthetic construct
  source 1..20: mol_type = other DNA
atccgatagtcaaactatga

SEQ ID NO: 1382 - DNA, 20 bp, synthetic construct
  source 1..20: mol_type = other DNA
aaacacccttccaatgaggg

SEQ ID NO: 1383 - DNA, 20 bp, synthetic construct
  source 1..20: mol_type = other DNA
gttcactagcatctgctaca

SEQ ID NO: 1384 - DNA, 20 bp, synthetic construct
  source 1..20: mol_type = other DNA
gctctttgtaggcccaaggg

SEQ ID NO: 1385 - DNA, 20 bp, synthetic construct
  source 1..20: mol_type = other DNA
ggttcctataaggaataggc

SEQ ID NO: 1386 - DNA, 20 bp, synthetic construct
  source 1..20: mol_type = other DNA
taataggcctttctacagct

SEQ ID NO: 1387 - DNA, 20 bp, synthetic construct
  source 1..20: mol_type = other DNA
ccccagggtcataggagtgt

SEQ ID NO: 1388 - DNA, 20 bp, synthetic construct
  source 1..20: mol_type = other DNA
ccaccaaccttaaatagtag

SEQ ID NO: 1389 - DNA, 20 bp, synthetic construct
  source 1..20: mol_type = other DNA
ccacagattggcttggaatg

SEQ ID NO: 1390 - DNA, 20 bp, synthetic construct
  source 1..20: mol_type = other DNA
gccttacgcttggctgacat

SEQ ID NO: 1391 - DNA, 20 bp, synthetic construct
  source 1..20: mol_type = other DNA
gtctctgtgtaccgagctca

SEQ ID NO: 1392 - DNA, 20 bp, synthetic construct
  source 1..20: mol_type = other DNA
gtctggtggccaagtgcttc

SEQ ID NO: 1393 - DNA, 20 bp, synthetic construct
  source 1..20: mol_type = other DNA
agccgagcattggcttcata

SEQ ID NO: 1394 - DNA, 20 bp, synthetic construct
  source 1..20: mol_type = other DNA
ggtggtggaatgctgtccac

SEQ ID NO: 1395 - DNA, 20 bp, synthetic construct
  source 1..20: mol_type = other DNA
ctccaccaaatacttagccc

SEQ ID NO: 1396 - DNA, 20 bp, synthetic construct
  source 1..20: mol_type = other DNA
taaatgtcaggaggtccccc

SEQ ID NO: 1397 - DNA, 20 bp, synthetic construct
  source 1..20: mol_type = other DNA
ccttgggttattcttaccgt

SEQ ID NO: 1398 - DNA, 20 bp, synthetic construct
  source 1..20: mol_type = other DNA
ggtagtataagaatggttcc

SEQ ID NO: 1399 - DNA, 20 bp, synthetic construct
  source 1..20: mol_type = other DNA
atacacttgggcccaaatgg

SEQ ID NO: 1400 - DNA, 20 bp, synthetic construct
  source 1..20: mol_type = other DNA
gctagcatttgagagttata

SEQ ID NO: 1401 - DNA, 20 bp, synthetic construct
  source 1..20: mol_type = other DNA
ggctgtaagggattaagatg

SEQ ID NO: 1402 - DNA, 20 bp, synthetic construct
  source 1..20: mol_type = other DNA
ctgttacagggagacaatct

SEQ ID NO: 1403 - DNA, 20 bp, synthetic construct
  source 1..20: mol_type = other DNA
accctgcacaaatggactgc

SEQ ID NO: 1404 - DNA, 20 bp, synthetic construct
  source 1..20: mol_type = other DNA
gggcacccccgtcaccgtgc

SEQ ID NO: 1405 - DNA, 20 bp, synthetic construct
  source 1..20: mol_type = other DNA
agattttccgacctatgtca

SEQ ID NO: 1406 - DNA, 20 bp, synthetic construct
  source 1..20: mol_type = other DNA
atcgccatggtcacttgcca

SEQ ID NO: 1407 - DNA, 20 bp, synthetic construct
  source 1..20: mol_type = other DNA
ggcaaagcaagttcgccaca

SEQ ID NO: 1408 - DNA, 20 bp, synthetic construct
  source 1..20: mol_type = other DNA
atcatacaggtcacttggct

SEQ ID NO: 1409 - DNA, 20 bp, synthetic construct
  source 1..20: mol_type = other DNA
attggactaggtaacagtga

SEQ ID NO: 1410 - DNA, 20 bp, synthetic construct
  source 1..20: mol_type = other DNA
caggctatttcttagtggac

SEQ ID NO: 1411 - DNA, 20 bp, synthetic construct
  source 1..20: mol_type = other DNA
caagggtaacctatagctga

SEQ ID NO: 1412 - DNA, 20 bp, synthetic construct
  source 1..20: mol_type = other DNA
gcatatgcacacttggatca

SEQ ID NO: 1413 - DNA, 20 bp, synthetic construct
  source 1..20: mol_type = other DNA
accctgaaaacaatcaatcg

SEQ ID NO: 1414 - DNA, 20 bp, synthetic construct
  source 1..20: mol_type = other DNA
acgataatcatgtggcctga

SEQ ID NO: 1415 - DNA, 20 bp, synthetic construct
  source 1..20: mol_type = other DNA
gactaactatacaggtctct

SEQ ID NO: 1416 - DNA, 20 bp, synthetic construct
  source 1..20: mol_type = other DNA
actacctaggctcacttgct

SEQ ID NO: 1417 - DNA, 20 bp, synthetic construct
  source 1..20: mol_type = other DNA
ccaggatgctaatgctccta

SEQ ID NO: 1418 - DNA, 20 bp, synthetic construct
  source 1..20: mol_type = other DNA
gcgctttcaccaagaaattt

SEQ ID NO: 1419 - DNA, 20 bp, synthetic construct
  source 1..20: mol_type = other DNA
gcaaagactacaccgtgaca

SEQ ID NO: 1420 - DNA, 20 bp, synthetic construct
  source 1..20: mol_type = other DNA
cccctgcattcagcttatag

SEQ ID NO: 1421 - DNA, 20 bp, synthetic construct
  source 1..20: mol_type = other DNA
gctatccaagtgacacagta

SEQ ID NO: 1422 - DNA, 20 bp, synthetic construct
  source 1..20: mol_type = other DNA
gggccgcacatctggacctc

SEQ ID NO: 1423 - DNA, 20 bp, synthetic construct
  source 1..20: mol_type = other DNA
tacaaaacgacctaaagacc

SEQ ID NO: 1424 - DNA, 20 bp, synthetic construct
  source 1..20: mol_type = other DNA
ctgcaatccttaagacttga

SEQ ID NO: 1425 - DNA, 20 bp, synthetic construct
  source 1..20: mol_type = other DNA
cctcaagacctataggacct

SEQ ID NO: 1426 - DNA, 20 bp, synthetic construct
  source 1..20: mol_type = other DNA
atacattgccagcactaagg

SEQ ID NO: 1427 - DNA, 20 bp, synthetic construct
  source 1..20: mol_type = other DNA
gatttaccacacatataggc

SEQ ID NO: 1428 - DNA, 20 bp, synthetic construct
  source 1..20: mol_type = other DNA
cgggctatgtgagataattc

SEQ ID NO: 1429 - DNA, 20 bp, synthetic construct
  source 1..20: mol_type = other DNA
ggctgacatgccccttttaa

SEQ ID NO: 1430 - DNA, 20 bp, synthetic construct
  source 1..20: mol_type = other DNA
gttgtgatagtcaacaattg

SEQ ID NO: 1431 - DNA, 20 bp, synthetic construct
  source 1..20: mol_type = other DNA
aggccctcttgtttcaattg

SEQ ID NO: 1432 - DNA, 20 bp, synthetic construct
  source 1..20: mol_type = other DNA
gattttattggtcatctcgg

SEQ ID NO: 1433 - DNA, 20 bp, synthetic construct
  source 1..20: mol_type = other DNA
gcctttctatttcagaccga

SEQ ID NO: 1434 - DNA, 20 bp, synthetic construct
  source 1..20: mol_type = other DNA
ggagtccatgaagtaactgg

SEQ ID NO: 1435 - DNA, 20 bp, synthetic construct
  source 1..20: mol_type = other DNA
aggttgcataaagccaggcc

SEQ ID NO: 1436 - DNA, 20 bp, synthetic construct
  source 1..20: mol_type = other DNA
ccctcttagtgattggtggt

SEQ ID NO: 1437 - DNA, 20 bp, synthetic construct
  source 1..20: mol_type = other DNA
ggttggcagtcttcaccagt

SEQ ID NO: 1438 - DNA, 20 bp, synthetic construct
  source 1..20: mol_type = other DNA
gcttgaatggataccaatta

SEQ ID NO: 1439 - DNA, 20 bp, synthetic construct
  source 1..20: mol_type = other DNA
ctcggtcaaactaataatac

SEQ ID NO: 1440 - DNA, 20 bp, synthetic construct
  source 1..20: mol_type = other DNA
ccagttttcgcccgttacct

SEQ ID NO: 1441 - DNA, 20 bp, synthetic construct
  source 1..20: mol_type = other DNA
gtagctataggtgtcacata

SEQ ID NO: 1442 - DNA, 20 bp, synthetic construct
  source 1..20: mol_type = other DNA
gcctcaaatatgtgatgcac

SEQ ID NO: 1443 - DNA, 20 bp, synthetic construct
  source 1..20: mol_type = other DNA
gaatggcaatacatccgtgt

SEQ ID NO: 1444 - DNA, 20 bp, synthetic construct
  source 1..20: mol_type = other DNA
tcaatggacccacatgatca

SEQ ID NO: 1445 - DNA, 20 bp, synthetic construct
  source 1..20: mol_type = other DNA
tgcatacccagggtaggatt

SEQ ID NO: 1446 - DNA, 20 bp, synthetic construct
  source 1..20: mol_type = other DNA
tctaatactacaacgatgga

SEQ ID NO: 1447 - DNA, 20 bp, synthetic construct
  source 1..20: mol_type = other DNA
aaccttcctaaaatccccga

SEQ ID NO: 1448 - DNA, 20 bp, synthetic construct
  source 1..20: mol_type = other DNA
gatatacccagttaatcagt

SEQ ID NO: 1449 - DNA, 20 bp, synthetic construct
  source 1..20: mol_type = other DNA
ttggcagatgtaacctattc

SEQ ID NO: 1450 - DNA, 20 bp, synthetic construct
  source 1..20: mol_type = other DNA
cgaccctcatcactttttga

SEQ ID NO: 1451 - DNA, 20 bp, synthetic construct
  source 1..20: mol_type = other DNA
acgggacctcaatactctac

SEQ ID NO: 1452 - DNA, 20 bp, synthetic construct
  source 1..20: mol_type = other DNA
attcaaggtagccccaatac

SEQ ID NO: 1453 - DNA, 20 bp, synthetic construct
  source 1..20: mol_type = other DNA
ctggcctttgggtcggatat

SEQ ID NO: 1454 - DNA, 20 bp, synthetic construct
  source 1..20: mol_type = other DNA
ccccagataatgcatagatc

SEQ ID NO: 1455 - DNA, 20 bp, synthetic construct
  source 1..20: mol_type = other DNA
gggctaagagtcacctgtat

SEQ ID NO: 1456 - DNA, 20 bp, synthetic construct
  source 1..20: mol_type = other DNA
cccttggccacctgacttcg

SEQ ID NO: 1457 - DNA, 20 bp, synthetic construct
  source 1..20: mol_type = other DNA
ttggctcagtgttcacttcg

SEQ ID NO: 1458 - DNA, 20 bp, synthetic construct
  source 1..20: mol_type = other DNA
gtaaccagacccaaggcact

SEQ ID NO: 1459 - DNA, 20 bp, synthetic construct
  source 1..20: mol_type = other DNA
gagatccatgaggtatatac

SEQ ID NO: 1460 - DNA, 20 bp, synthetic construct
  source 1..20: mol_type = other DNA
gcccagtgccctataggtca

SEQ ID NO: 1461 - DNA, 20 bp, synthetic construct
  source 1..20: mol_type = other DNA
gctatttcattaagtcaccc

SEQ ID NO: 1462 - DNA, 20 bp, synthetic construct
  source 1..20: mol_type = other DNA
ccatggaatggctgtcatgc

SEQ ID NO: 1463 - DNA, 20 bp, synthetic construct
  source 1..20: mol_type = other DNA
ttatcttcttagggtcgact

SEQ ID NO: 1464 - DNA, 20 bp, synthetic construct
  source 1..20: mol_type = other DNA
agctatccgcttcccaaggg

SEQ ID NO: 1465 - DNA, 20 bp, synthetic construct
  source 1..20: mol_type = other DNA
ccctgagatgctagttgggc

SEQ ID NO: 1466 - DNA, 20 bp, synthetic construct
  source 1..20: mol_type = other DNA
gtatgtccttggaggtgagc

SEQ ID NO: 1467 - DNA, 20 bp, synthetic construct
  source 1..20: mol_type = other DNA
gcctttcattttgggagtgc

SEQ ID NO: 1468 - DNA, 20 bp, synthetic construct
  source 1..20: mol_type = other DNA
ggcatggagatccaacctgt

SEQ ID NO: 1469 - DNA, 20 bp, synthetic construct
  source 1..20: mol_type = other DNA
ggcactgcaggatagccatt

SEQ ID NO: 1470 - DNA, 20 bp, synthetic construct
  source 1..20: mol_type = other DNA
cgttatcctaagaagtgact

SEQ ID NO: 1471 - DNA, 20 bp, synthetic construct
  source 1..20: mol_type = other DNA
tcaacatgtgttaacggaac

SEQ ID NO: 1472 - DNA, 20 bp, synthetic construct
  source 1..20: mol_type = other DNA
gtacctgcagtgcatagagc

SEQ ID NO: 1473 - DNA, 20 bp, synthetic construct
  source 1..20: mol_type = other DNA
gattgattcagtgctcatgc

SEQ ID NO: 1474 - DNA, 20 bp, synthetic construct
  source 1..20: mol_type = other DNA
actgcagataggtaggtgat

SEQ ID NO: 1475 - DNA, 20 bp, synthetic construct
  source 1..20: mol_type = other DNA
gttggaagctgccagcttag

SEQ ID NO: 1476 - DNA, 20 bp, synthetic construct
  source 1..20: mol_type = other DNA
actggcctgtggcagttaac

SEQ ID NO: 1477 - DNA, 20 bp, synthetic construct
  source 1..20: mol_type = other DNA
gcgctggctcacgcatgctc

SEQ ID NO: 1478 - DNA, 20 bp, synthetic construct
  source 1..20: mol_type = other DNA
cctagagtttccttctcccg

SEQ ID NO: 1479 - DNA, 20 bp, synthetic construct
  source 1..20: mol_type = other DNA
gggatgccaatgcctccaac

SEQ ID NO: 1480 - DNA, 20 bp, synthetic construct
  source 1..20: mol_type = other DNA
taaattgccctgggtgcagc

SEQ ID NO: 1481 - DNA, 20 bp, synthetic construct
  source 1..20: mol_type = other DNA
gccctttcaggaccaactgg

SEQ ID NO: 1482 - DNA, 20 bp, synthetic construct
  source 1..20: mol_type = other DNA
gttgggcaaacaagttaccc

SEQ ID NO: 1483 - DNA, 20 bp, synthetic construct
  source 1..20: mol_type = other DNA
gggaccccaatttactacgc

SEQ ID NO: 1484 - DNA, 20 bp, synthetic construct
  source 1..20: mol_type = other DNA
cttcttgcaaggattggcac

SEQ ID NO: 1485 - DNA, 20 bp, synthetic construct
  source 1..20: mol_type = other DNA
actgagatgtgtgatactcc

SEQ ID NO: 1486 - DNA, 20 bp, synthetic construct
  source 1..20: mol_type = other DNA
ccactcaatagaatagtgcc

SEQ ID NO: 1487 - DNA, 20 bp, synthetic construct
  source 1..20: mol_type = other DNA
cccaattgcaaggaccctta

SEQ ID NO: 1488 - DNA, 20 bp, synthetic construct
  source 1..20: mol_type = other DNA
gaacatgtagccataatgcc

SEQ ID NO: 1489 - DNA, 20 bp, synthetic construct
  source 1..20: mol_type = other DNA
gagtggcatccttaaatcct

SEQ ID NO: 1490 - DNA, 20 bp, synthetic construct
  source 1..20: mol_type = other DNA
taattggtcaagtaaacagc

SEQ ID NO: 1491 - DNA, 20 bp, synthetic construct
  source 1..20: mol_type = other DNA
tccaccgttactgattatct

SEQ ID NO: 1492 - DNA, 20 bp, synthetic construct
  source 1..20: mol_type = other DNA
caagtcccaccatgttaatc

SEQ ID NO: 1493 - DNA, 20 bp, synthetic construct
  source 1..20: mol_type = other DNA
gttaggatctatttgacagc

SEQ ID NO: 1494 - DNA, 20 bp, synthetic construct
  source 1..20: mol_type = other DNA
aggcctgctccgaatgtgtt

SEQ ID NO: 1495 - DNA, 20 bp, synthetic construct
  source 1..20: mol_type = other DNA
gtgcatggttatctaatgca

SEQ ID NO: 1496 - DNA, 20 bp, synthetic construct
  source 1..20: mol_type = other DNA
ttgggtcactaggcacacta

SEQ ID NO: 1497 - DNA, 20 bp, synthetic construct
  source 1..20: mol_type = other DNA
tgactagttcgataagtttt

SEQ ID NO: 1498 - DNA, 20 bp, synthetic construct
  source 1..20: mol_type = other DNA
tgtcgagaactcaaaaggtg

SEQ ID NO: 1499 - DNA, 20 bp, synthetic construct
  source 1..20: mol_type = other DNA
ctgtatagtttacccaggca

SEQ ID NO: 1500 - DNA, 20 bp, synthetic construct
  source 1..20: mol_type = other DNA
cagagtgcattggcaactcg

SEQ ID NO: 1501 - DNA, 20 bp, synthetic construct
  source 1..20: mol_type = other DNA
gatcttggtaaggcagctcc

SEQ ID NO: 1502 - DNA, 20 bp, synthetic construct
  source 1..20: mol_type = other DNA
caatttggtcccattgtagt

SEQ ID NO: 1503 - DNA, 20 bp, synthetic construct
  source 1..20: mol_type = other DNA
tctatcaaggctgttattgg

SEQ ID NO: 1504 - DNA, 20 bp, synthetic construct
  source 1..20: mol_type = other DNA
gctcagttaggttagtgcac

SEQ ID NO: 1505 - DNA, 20 bp, synthetic construct
  source 1..20: mol_type = other DNA
tctagggctccagtttatgt

SEQ ID NO: 1506 - DNA, 20 bp, synthetic construct
  source 1..20: mol_type = other DNA
ctttggttatgtacattgcc

SEQ ID NO: 1507 - DNA, 20 bp, synthetic construct
  source 1..20: mol_type = other DNA
gcctgtatgtcttgagaaac

SEQ ID NO: 1508 - DNA, 20 bp, synthetic construct
  source 1..20: mol_type = other DNA
ctcgcttttcacaggagcgc

SEQ ID NO: 1509 - DNA, 20 bp, synthetic construct
  source 1..20: mol_type = other DNA
tcacagagtagtctattggt

SEQ ID NO: 1510 - DNA, 20 bp, synthetic construct
  source 1..20: mol_type = other DNA
gtaagtatagatgcctctcc

SEQ ID NO: 1511 - DNA, 20 bp, synthetic construct
  source 1..20: mol_type = other DNA
gcaaactttaggagtgtgtt

SEQ ID NO: 1512 - DNA, 20 bp, synthetic construct
  source 1..20: mol_type = other DNA
ggtattgacacctccaactg

SEQ ID NO: 1513 - DNA, 20 bp, synthetic construct
  source 1..20: mol_type = other DNA
atataagggtaatacggacc

SEQ ID NO: 1514 - DNA, 20 bp, synthetic construct
  source 1..20: mol_type = other DNA
gccccctgccgtgtgaaaga

SEQ ID NO: 1515 - DNA, 20 bp, synthetic construct
  source 1..20: mol_type = other DNA
cttcaagactaaggtaggga

SEQ ID NO: 1516 - DNA, 20 bp, synthetic construct
  source 1..20: mol_type = other DNA
gtatgcgaagcgaacgaagc

SEQ ID NO: 1517 - DNA, 20 bp, synthetic construct
  source 1..20: mol_type = other DNA
cctaaaaaacccgtgtacac

SEQ ID NO: 1518 - DNA, 20 bp, synthetic construct
  source 1..20: mol_type = other DNA
ggtggccttcagtcagtaca

SEQ ID NO: 1519 - DNA, 20 bp, synthetic construct
  source 1..20: mol_type = other DNA
gcccagactcatgctggtta

SEQ ID NO: 1520 - DNA, 20 bp, synthetic construct
  source 1..20: mol_type = other DNA
atacttcacctaatagcacc

SEQ ID NO: 1521 - DNA, 20 bp, synthetic construct
  source 1..20: mol_type = other DNA
ggagttctttaggttggaac

SEQ ID NO: 1522 - DNA, 20 bp, synthetic construct
  source 1..20: mol_type = other DNA
gcaactatgggtggagacat

SEQ ID NO: 1523 - DNA, 20 bp, synthetic construct
  source 1..20: mol_type = other DNA
tcgggccaggtccaggcgca

SEQ ID NO: 1524 - DNA, 20 bp, synthetic construct
  source 1..20: mol_type = other DNA
gctgtcatatgggaactacg

SEQ ID NO: 1525 - DNA, 20 bp, synthetic construct
  source 1..20: mol_type = other DNA
caaacctacgccaataaaga

SEQ ID NO: 1526 - DNA, 20 bp, synthetic construct
  source 1..20: mol_type = other DNA
tttatcgcttaaagtagcct

SEQ ID NO: 1527 - DNA, 20 bp, synthetic construct
  source 1..20: mol_type = other DNA
cgtatatcgaataccctcaa

SEQ ID NO: 1528 - DNA, 20 bp, synthetic construct
  source 1..20: mol_type = other DNA
gtaagagttagctattcccc

SEQ ID NO: 1529 - DNA, 20 bp, synthetic construct
  source 1..20: mol_type = other DNA
cagtaaagagccacctaagg

SEQ ID NO: 1530 - DNA, 20 bp, synthetic construct
  source 1..20: mol_type = other DNA
ggcaaggctaaggagtgctc

SEQ ID NO: 1531 - DNA, 20 bp, synthetic construct
  source 1..20: mol_type = other DNA
gctacccattagacccatgg

SEQ ID NO: 1532 - DNA, 20 bp, synthetic construct
  source 1..20: mol_type = other DNA
ggagtccctgtgtcattgga

SEQ ID NO: 1533 - DNA, 20 bp, synthetic construct
  source 1..20: mol_type = other DNA
ggatgtagcccatcaaccct

SEQ ID NO: 1534 - DNA, 20 bp, synthetic construct
  source 1..20: mol_type = other DNA
ccagttaatctctgacatgg

SEQ ID NO: 1535 - DNA, 20 bp, synthetic construct
  source 1..20: mol_type = other DNA
aggtgatgacacccctacca

SEQ ID NO: 1536 - DNA, 20 bp, synthetic construct
  source 1..20: mol_type = other DNA
gggtgtctctttgacaccac

SEQ ID NO: 1537 - DNA, 20 bp, synthetic construct
  source 1..20: mol_type = other DNA
aggcagtcagggtaatgcta

SEQ ID NO: 1538 - DNA, 20 bp, synthetic construct
  source 1..20: mol_type = other DNA
ccttctgtcccaacggagcc

SEQ ID NO: 1539 - DNA, 20 bp, synthetic construct
  source 1..20: mol_type = other DNA
ctctcgctgaggacacatca

SEQ ID NO: 1540 - DNA, 20 bp, synthetic construct
  source 1..20: mol_type = other DNA
accacagggtactattctgg

SEQ ID NO: 1541 - DNA, 20 bp, synthetic construct
  source 1..20: mol_type = other DNA
ctgctctgttagccgagcat

SEQ ID NO: 1542 - DNA, 20 bp, synthetic construct
  source 1..20: mol_type = other DNA
gcttgtatgccccactggag

SEQ ID NO: 1543 - DNA, 20 bp, synthetic construct
  source 1..20: mol_type = other DNA
gcttgccatgttttatagac

SEQ ID NO: 1544 - DNA, 20 bp, synthetic construct
  source 1..20: mol_type = other DNA
ctcaggatcgctggccattt

SEQ ID NO: 1545 - DNA, 20 bp, synthetic construct
  source 1..20: mol_type = other DNA
gcctaaaggtagttctccct

SEQ ID NO: 1546 - DNA, 20 bp, synthetic construct
  source 1..20: mol_type = other DNA
caggagggtgtcaaccagac

SEQ ID NO: 1547 - DNA, 20 bp, synthetic construct
  source 1..20: mol_type = other DNA
ggcagataacctccaagtgc

SEQ ID NO: 1548 - DNA, 20 bp, synthetic construct
  source 1..20: mol_type = other DNA
cacatagaccatagctgaac

SEQ ID NO: 1549 - DNA, 20 bp, synthetic construct
  source 1..20: mol_type = other DNA
gtctagtatgtctgagtgtc

SEQ ID NO: 1550 - DNA, 20 bp, synthetic construct
  source 1..20: mol_type = other DNA
gactcgggacatttaggatg

SEQ ID NO: 1551 - DNA, 20 bp, synthetic construct
  source 1..20: mol_type = other DNA
ataggccacgctggtcactg

SEQ ID NO: 1552 - DNA, 20 bp, synthetic construct
  source 1..20: mol_type = other DNA
tcatcctctatggacccacg

SEQ ID NO: 1553 - DNA, 20 bp, synthetic construct
  source 1..20: mol_type = other DNA
cccgacttacattacctacc

SEQ ID NO: 1554 - DNA, 20 bp, synthetic construct
  source 1..20: mol_type = other DNA
atgatctgctgttcagtgcg

SEQ ID NO: 1555 - DNA, 20 bp, synthetic construct
  source 1..20: mol_type = other DNA
aggccaagtggtgctcttcc

SEQ ID NO: 1556 - DNA, 20 bp, synthetic construct
  source 1..20: mol_type = other DNA
attcagatactagtttaccc

SEQ ID NO: 1557 - DNA, 20 bp, synthetic construct
  source 1..20: mol_type = other DNA
tctaggtaggctgagcctca

SEQ ID NO: 1558 - DNA, 20 bp, synthetic construct
  source 1..20: mol_type = other DNA
ttgtcttggaacatacggat

SEQ ID NO: 1559 - DNA, 20 bp, synthetic construct
  source 1..20: mol_type = other DNA
gattggcactattttgagcc

SEQ ID NO: 1560 - DNA, 20 bp, synthetic construct
  source 1..20: mol_type = other DNA
gatactccaaatatgacccg

SEQ ID NO: 1561 - DNA, 20 bp, synthetic construct
  source 1..20: mol_type = other DNA
aatagaatagtgccagtagg

SEQ ID NO: 1562 - DNA, 20 bp, synthetic construct
  source 1..20: mol_type = other DNA
ttgcaaggacccttaagtca

SEQ ID NO: 1563 - DNA, 20 bp, synthetic construct
  source 1..20: mol_type = other DNA
gtagccataatgccatagtc

SEQ ID NO: 1564 - DNA, 20 bp, synthetic construct
  source 1..20: mol_type = other DNA
gcatccttaaatcctggttg

SEQ ID NO: 1565 - DNA, 20 bp, synthetic construct
  source 1..20: mol_type = other DNA
gcaatatccatagtgatctg

SEQ ID NO: 1566 - DNA, 20 bp, synthetic construct
  source 1..20: mol_type = other DNA
cgttactgattatcttatcc

SEQ ID NO: 1567 - DNA, 20 bp, synthetic construct
  source 1..20: mol_type = other DNA
cccaccatgttaatcaaggc

SEQ ID NO: 1568 - DNA, 20 bp, synthetic construct
  source 1..20: mol_type = other DNA
caggtgtatattccctatcc

SEQ ID NO: 1569 - DNA, 20 bp, synthetic construct
  source 1..20: mol_type = other DNA
ccgaatgtgttatttatcct

SEQ ID NO: 1570 - DNA, 20 bp, synthetic construct
  source 1..20: mol_type = other DNA
ggttatctaatgcatcatca

SEQ ID NO: 1571 - DNA, 20 bp, synthetic construct
  source 1..20: mol_type = other DNA
ctaggcacactaaagtgcac

SEQ ID NO: 1572 - DNA, 20 bp, synthetic construct
  source 1..20: mol_type = other DNA
gatgcaatcacagcaagtac

SEQ ID NO: 1573 - DNA, 20 bp, synthetic construct
  source 1..20: mol_type = other DNA
gtcgagaactcaaaaggtga

SEQ ID NO: 1574 - DNA, 20 bp, synthetic construct
  source 1..20: mol_type = other DNA
gtttacccaggcaatggctc

SEQ ID NO: 1575 - DNA, 20 bp, synthetic construct
  source 1..20: mol_type = other DNA
gcaactcgatgttcttgctt

SEQ ID NO: 1576 - DNA, 20 bp, synthetic construct
  source 1..20: mol_type = other DNA
ttggtaaggcagctcctgac

SEQ ID NO: 1577 - DNA, 20 bp, synthetic construct
  source 1..20: mol_type = other DNA
tggtcccattgtagttgtgt

SEQ ID NO: 1578 - DNA, 20 bp, synthetic construct
  source 1..20: mol_type = other DNA
ctatcaaggctgttattggt

SEQ ID NO: 1579 - DNA, 20 bp, synthetic construct
  source 1..20: mol_type = other DNA
gcttctaactaacatgcctc

SEQ ID NO: 1580 - DNA, 20 bp, synthetic construct
  source 1..20: mol_type = other DNA
gggctccagtttatgtatcc

SEQ ID NO: 1581 - DNA, 20 bp, synthetic construct
  source 1..20: mol_type = other DNA
tagcctgcatggtttacagt

SEQ ID NO: 1582 - DNA, 20 bp, synthetic construct
  source 1..20: mol_type = other DNA
gggctcttgttactgagctg

SEQ ID NO: 1583 - DNA, 20 bp, synthetic construct
  source 1..20: mol_type = other DNA
tttcacaggagcgcacttgg

SEQ ID NO: 1584 - DNA, 20 bp, synthetic construct
  source 1..20: mol_type = other DNA
gagtagtctattggtgttcc

SEQ ID NO: 1585 - DNA, 20 bp, synthetic construct
  source 1..20: mol_type = other DNA
ccctacccttgcatgctatg

SEQ ID NO: 1586 - DNA, 20 bp, synthetic construct
  source 1..20: mol_type = other DNA
ccattgagtatattacctcc

SEQ ID NO: 1587 - DNA, 20 bp, synthetic construct
  source 1..20: mol_type = other DNA
cctccaactgtaatcattga

SEQ ID NO: 1588 - DNA, 20 bp, synthetic construct
  source 1..20: mol_type = other DNA
gtaatacggacctcatacag

SEQ ID NO: 1589 - DNA, 20 bp, synthetic construct
  source 1..20: mol_type = other DNA
actacttgtcccctgggctt

SEQ ID NO: 1590 - DNA, 20 bp, synthetic construct
  source 1..20: mol_type = other DNA
cttgcttgtatggtctgatg

SEQ ID NO: 1591 - DNA, 20 bp, synthetic construct
  source 1..20: mol_type = other DNA
aaaagtaggtttgcggatgc

SEQ ID NO: 1592 - DNA, 20 bp, synthetic construct
  source 1..20: mol_type = other DNA
acccgtgtacacagtgggat

SEQ ID NO: 1593 - DNA, 20 bp, synthetic construct
  source 1..20: mol_type = other DNA
gtcagtacacaagcaggtag

SEQ ID NO: 1594 - DNA, 20 bp, synthetic construct
  source 1..20: mol_type = other DNA
tcatgctggttactagggcc

SEQ ID NO: 1595 - DNA, 20 bp, synthetic construct
  source 1..20: mol_type = other DNA
gttaggccacaagacttaat

SEQ ID NO: 1596 - DNA, 20 bp, synthetic construct
  source 1..20: mol_type = other DNA
ctcaaacccgtataaagatg

SEQ ID NO: 1597 - DNA, 20 bp, synthetic construct
  source 1..20: mol_type = other DNA
gacatacaatggaccaccta

SEQ ID NO: 1598 - DNA, 20 bp, synthetic construct
  source 1..20: mol_type = other DNA
ggaagttccaacccttactc

SEQ ID NO: 1599 - DNA, 20 bp, synthetic construct
  source 1..20: mol_type = other DNA
gaatccactacatgggatta

SEQ ID NO: 1600 - DNA, 20 bp, synthetic construct
  source 1..20: mol_type = other DNA
gactaagcccgaaagttagc

SEQ ID NO: 1601 - DNA, 20 bp, synthetic construct
  source 1..20: mol_type = other DNA
cgcttaaagtagcctaagga

SEQ ID NO: 1602 - DNA, 20 bp, synthetic construct
  source 1..20: mol_type = other DNA
cgaataccctcaacttcacc

SEQ ID NO: 1603 - DNA, 20 bp, synthetic construct
  source 1..20: mol_type = other DNA
caaccttgatagcagcttat

SEQ ID NO: 1604 - DNA, 20 bp, synthetic construct
  source 1..20: mol_type = other DNA
gtgaaactaagcacatccga

SEQ ID NO: 1605 - DNA, 20 bp, synthetic construct
  source 1..20: mol_type = other DNA
ggctaaggagtgctctttgt

SEQ ID NO: 1606 - DNA, 20 bp, synthetic construct
  source 1..20: mol_type = other DNA
cccattagacccatggctca

SEQ ID NO: 1607 - DNA, 20 bp, synthetic construct
  source 1..20: mol_type = other DNA
tacaacagtcccaggctagg

SEQ ID NO: 1608 - DNA, 20 bp, synthetic construct
  source 1..20: mol_type = other DNA
gtagcccatcaaccctggga

SEQ ID NO: 1609 - DNA, 20 bp, synthetic construct
  source 1..20: mol_type = other DNA
ctgacatggactaataggcc

SEQ ID NO: 1610 - DNA, 20 bp, synthetic construct
  source 1..20: mol_type = other DNA
gacacccctaccatggctac

SEQ ID NO: 1611 - DNA, 20 bp, synthetic construct
  source 1..20: mol_type = other DNA
gtctctttgacaccaccaac

SEQ ID NO: 1612 - DNA, 20 bp, synthetic construct
  source 1..20: mol_type = other DNA
gtaatgctatcttccatgcc

SEQ ID NO: 1613 - DNA, 20 bp, synthetic construct
  source 1..20: mol_type = other DNA
gtcccaacggagccttacgc

SEQ ID NO: 1614 - DNA, 20 bp, synthetic construct
  source 1..20: mol_type = other DNA
cacatcagctgttagcagtc

SEQ ID NO: 1615 - DNA, 20 bp, synthetic construct
  source 1..20: mol_type = other DNA
actctgtaggttgacaggac

SEQ ID NO: 1616 - DNA, 20 bp, synthetic construct
  source 1..20: mol_type = other DNA
ctgttagccgagcattggct

SEQ ID NO: 1617 - DNA, 20 bp, synthetic construct
  source 1..20: mol_type = other DNA
atgccccactggagaagtct

SEQ ID NO: 1618 - DNA, 20 bp, synthetic construct
  source 1..20: mol_type = other DNA
cgtcttcccgcaccatgcat

SEQ ID NO: 1619 - DNA, 20 bp, synthetic construct
  source 1..20: mol_type = other DNA
cgtgtcactttcaggtcagc

SEQ ID NO: 1620 - DNA, 20 bp, synthetic construct
  source 1..20: mol_type = other DNA
ggtagttctcccttctgtca

SEQ ID NO: 1621 - DNA, 20 bp, synthetic construct
  source 1..20: mol_type = other DNA
gggtgtcaaccagacttcca

SEQ ID NO: 1622 - DNA, 20 bp, synthetic construct
  source 1..20: mol_type = other DNA
gctcatcacaactgggtggt

SEQ ID NO: 1623 - DNA, 20 bp, synthetic construct
  source 1..20: mol_type = other DNA
accatagctgaacctgtggc

SEQ ID NO: 1624 - DNA, 20 bp, synthetic construct
  source 1..20: mol_type = other DNA
gtctgagtgtcaggctgtaa

SEQ ID NO: 1625 - DNA, 20 bp, synthetic construct
  source 1..20: mol_type = other DNA
gtgtgccataggtttcaggc

SEQ ID NO: 1626 - DNA, 20 bp, synthetic construct
  source 1..20: mol_type = other DNA
ccacgctggtcactgaaaga

SEQ ID NO: 1627 - DNA, 20 bp, synthetic construct
  source 1..20: mol_type = other DNA
ccgctcaatgcaggacacca

SEQ ID NO: 1628 - DNA, 20 bp, synthetic construct
  source 1..20: mol_type = other DNA
tgctccataggtaagatggt

SEQ ID NO: 1629 - DNA, 20 bp, synthetic construct
  source 1..20: mol_type = other DNA
taggcactgcctttgttgcg

SEQ ID NO: 1630 - DNA, 20 bp, synthetic construct
  source 1..20: mol_type = other DNA
gtcgaagacaatataacatc

SEQ ID NO: 1631 - DNA, 20 bp, synthetic construct
  source 1..20: mol_type = other DNA
atcagggcacatggagttgt

SEQ ID NO: 1632 - DNA, 20 bp, synthetic construct
  source 1..20: mol_type = other DNA
cccttaggtgggagtcttcc

SEQ ID NO: 1633 - DNA, 20 bp, synthetic construct
  source 1..20: mol_type = other DNA
ggctctagaccattgactca

SEQ ID NO: 1634 - DNA, 20 bp, synthetic construct
  source 1..20: mol_type = other DNA
gtagtgcctcaatgatccac

SEQ ID NO: 1635 - DNA, 20 bp, synthetic construct
  source 1..20: mol_type = other DNA
ggtaaagtggactggatgcc

SEQ ID NO: 1636 - DNA, 20 bp, synthetic construct
  source 1..20: mol_type = other DNA
ctcatgaggattgcatcaca

SEQ ID NO: 1637 - DNA, 20 bp, synthetic construct
  source 1..20: mol_type = other DNA
aggaacggccctgactgtca

SEQ ID NO: 1638 - DNA, 20 bp, synthetic construct
  source 1..20: mol_type = other DNA
ccatatcaataacaattggc

SEQ ID NO: 1639 - DNA, 20 bp, synthetic construct
  source 1..20: mol_type = other DNA
ggaactccagccagtgaata

SEQ ID NO: 1640 - DNA, 20 bp, synthetic construct
  source 1..20: mol_type = other DNA
atgagggaagtctaggtctc

SEQ ID NO: 1641 - DNA, 20 bp, synthetic construct
  source 1..20: mol_type = other DNA
acataggcactctactagct

SEQ ID NO: 1642 - DNA, 20 bp, synthetic construct
  source 1..20: mol_type = other DNA
tatcagtcatagctacacac

SEQ ID NO: 1643 - DNA, 20 bp, synthetic construct
  source 1..20: mol_type = other DNA
ggtggatgtctgacttgact

SEQ ID NO: 1644 - DNA, 20 bp, synthetic construct
  source 1..20: mol_type = other DNA
gctaaagttgtggtctacca

SEQ ID NO: 1645 - DNA, 20 bp, synthetic construct
  source 1..20: mol_type = other DNA
ttctcatcatcgatccaaac

SEQ ID NO: 1646 - DNA, 20 bp, synthetic construct
  source 1..20: mol_type = other DNA
taatggcttagctactcacc

SEQ ID NO: 1647 - DNA, 20 bp, synthetic construct
  source 1..20: mol_type = other DNA
gagaacccacttgatctatt

SEQ ID NO: 1648 - DNA, 20 bp, synthetic construct
  source 1..20: mol_type = other DNA
ggacctcaggagattgtaca

SEQ ID NO: 1649 - DNA, 20 bp, synthetic construct
  source 1..20: mol_type = other DNA
tatagtgtggatggtatcct

SEQ ID NO: 1650 - DNA, 20 bp, synthetic construct
  source 1..20: mol_type = other DNA
gtacacagggatttgagcct

SEQ ID NO: 1651 - DNA, 20 bp, synthetic construct
  source 1..20: mol_type = other DNA
ggaacattcagctagactag

SEQ ID NO: 1652 - DNA, 20 bp, synthetic construct
  source 1..20: mol_type = other DNA
taaattggtctggttacaag

SEQ ID NO: 1653 - DNA, 20 bp, synthetic construct
  source 1..20: mol_type = other DNA
cctatagattgggctttaga

SEQ ID NO: 1654 - DNA, 20 bp, synthetic construct
  source 1..20: mol_type = other DNA
gtctatatttggtaagacac

SEQ ID NO: 1655 - DNA, 20 bp, synthetic construct
  source 1..20: mol_type = other DNA
attggtcatctcgggtatat

SEQ ID NO: 1656 - DNA, 20 bp, synthetic construct
  source 1..20: mol_type = other DNA
ttcagaccgaaggagttcct

SEQ ID NO: 1657 - DNA, 20 bp, synthetic construct
  source 1..20: mol_type = other DNA
gtaggatctatggcagttcc

SEQ ID NO: 1658 - DNA, 20 bp, synthetic construct
  source 1..20: mol_type = other DNA
gttctacagagtggagccag

SEQ ID NO: 1659 - DNA, 20 bp, synthetic construct
  source 1..20: mol_type = other DNA
gattggtggtttattcatcg

SEQ ID NO: 1660 - DNA, 20 bp, synthetic construct
  source 1..20: mol_type = other DNA
tacccattgcaagttaacta

SEQ ID NO: 1661 - DNA, 20 bp, synthetic construct
  source 1..20: mol_type = other DNA
tcctaatagttggaggtggt

SEQ ID NO: 1662 - DNA, 20 bp, synthetic construct
  source 1..20: mol_type = other DNA
cagcctaatatgtgtcatcc

SEQ ID NO: 1663 - DNA, 20 bp, synthetic construct
  source 1..20: mol_type = other DNA
cgttacctcaattctatggt

SEQ ID NO: 1664 - DNA, 20 bp, synthetic construct
  source 1..20: mol_type = other DNA
actggagtcctggttgatgt

SEQ ID NO: 1665 - DNA, 20 bp, synthetic construct
  source 1..20: mol_type = other DNA
acaaaacgggcatgctttat

SEQ ID NO: 1666 - DNA, 20 bp, synthetic construct
  source 1..20: mol_type = other DNA
gcggataaattggatttatc

SEQ ID NO: 1667 - DNA, 20 bp, synthetic construct
  source 1..20: mol_type = other DNA
aggcaatggacttagtacac

SEQ ID NO: 1668 - DNA, 20 bp, synthetic construct
  source 1..20: mol_type = other DNA
cccagggtaggattcatggt

SEQ ID NO: 1669 - DNA, 20 bp, synthetic construct
  source 1..20: mol_type = other DNA
caagtgatgatgttgtatgc

SEQ ID NO: 1670 - DNA, 20 bp, synthetic construct
  source 1..20: mol_type = other DNA
atccccgaatgggagagatt

SEQ ID NO: 1671 - DNA, 20 bp, synthetic construct
  source 1..20: mol_type = other DNA
gtgaacgaatactgtggcat

SEQ ID NO: 1672 - DNA, 20 bp, synthetic construct
  source 1..20: mol_type = other DNA
ccaacctgtcatgggactgc

SEQ ID NO: 1673 - DNA, 20 bp, synthetic construct
  source 1..20: mol_type = other DNA
taggcctaatctatgctggg

SEQ ID NO: 1674 - DNA, 20 bp, synthetic construct
  source 1..20: mol_type = other DNA
tctcaaaagacattcggtac

SEQ ID NO: 1675 - DNA, 20 bp, synthetic construct
  source 1..20: mol_type = other DNA
ccatgggcagattgatcacc

SEQ ID NO: 1676 - DNA, 20 bp, synthetic construct
  source 1..20: mol_type = other DNA
tgcctaagggagtttgtcac

SEQ ID NO: 1677 - DNA, 20 bp, synthetic construct
  source 1..20: mol_type = other DNA
atgtttagaggtcaagccct

SEQ ID NO: 1678 - DNA, 20 bp, synthetic construct
  source 1..20: mol_type = other DNA
tgggtcggatatagctttta

SEQ ID NO: 1679 - DNA, 20 bp, synthetic construct
  source 1..20: mol_type = other DNA
gacatctgcttatgtagctc

SEQ ID NO: 1680 - DNA, 20 bp, synthetic construct
  source 1..20: mol_type = other DNA
agttactttgggacatccca

SEQ ID NO: 1681 - DNA, 20 bp, synthetic construct
  source 1..20: mol_type = other DNA
gtttggaacatcatgttagc

SEQ ID NO: 1682 - DNA, 20 bp, synthetic construct
  source 1..20: mol_type = other DNA
tccaactgatgcatcaagcc

SEQ ID NO: 1683 - DNA, 20 bp, synthetic construct
  source 1..20: mol_type = other DNA
gcctatatccaaccagctac

SEQ ID NO: 1684 - DNA, 20 bp, synthetic construct
  source 1..20: mol_type = other DNA
cgttggaaacttcaaaggca

SEQ ID NO: 1685 - DNA, 20 bp, synthetic construct
  source 1..20: mol_type = other DNA
ccttggttgtggtgaaaccc

SEQ ID NO: 1686 - DNA, 20 bp, synthetic construct
  source 1..20: mol_type = other DNA
tatcttaactggtgaactcc

SEQ ID NO: 1687 - DNA, 20 bp, synthetic construct
  source 1..20: mol_type = other DNA
ggatggttgacctcaaaatt

SEQ ID NO: 1688 - DNA, 20 bp, synthetic construct
  source 1..20: mol_type = other DNA
tggttacccatacagtatat

SEQ ID NO: 1689 - DNA, 20 bp, synthetic construct
  source 1..20: mol_type = other DNA
gcttttcagtcaggtacagg

SEQ ID NO: 1690 - DNA, 20 bp, synthetic construct
  source 1..20: mol_type = other DNA
gacctgtgagggtgcttagt

SEQ ID NO: 1691 - DNA, 20 bp, synthetic construct
  source 1..20: mol_type = other DNA
gtttgaccagctccttgttg

SEQ ID NO: 1692 - DNA, 20 bp, synthetic construct
  source 1..20: mol_type = other DNA
ttgggagtgctccacacttc

SEQ ID NO: 1693 - DNA, 20 bp, synthetic construct
  source 1..20: mol_type = other DNA
gatgccctggtcctagcttc

SEQ ID NO: 1694 - DNA, 20 bp, synthetic construct
  source 1..20: mol_type = other DNA
gatagccattcgatacctgc

SEQ ID NO: 1695 - DNA, 20 bp, synthetic construct
  source 1..20: mol_type = other DNA
gcttctacataaccgaagtg

SEQ ID NO: 1696 - DNA, 20 bp, synthetic construct
  source 1..20: mol_type = other DNA
ctagtgcctattacaatctg

SEQ ID NO: 1697 - DNA, 20 bp, synthetic construct
  source 1..20: mol_type = other DNA
catgtgctttgtggacccat

SEQ ID NO: 1698 - DNA, 20 bp, synthetic construct
  source 1..20: mol_type = other DNA
gctggacggacagtgttgct

SEQ ID NO: 1699 - DNA, 20 bp, synthetic construct
  source 1..20: mol_type = other DNA
ggtgatgaaggtcaagccga

SEQ ID NO: 1700 - DNA, 20 bp, synthetic construct
  source 1..20: mol_type = other DNA
gtggtttccagcagggtgta

SEQ ID NO: 1701 - DNA, 20 bp, synthetic construct
  source 1..20: mol_type = other DNA
actaaagagtactcctacca

SEQ ID NO: 1702 - DNA, 20 bp, synthetic construct
  source 1..20: mol_type = other DNA
gtaatgatttgccctcctac

SEQ ID NO: 1703 - DNA, 20 bp, synthetic construct
  source 1..20: mol_type = other DNA
ccagcgggacctggacaagc

SEQ ID NO: 1704 - DNA, 20 bp, synthetic construct
  source 1..20: mol_type = other DNA
ggtgtagtggcaagaagttc

SEQ ID NO: 1705 - DNA, 20 bp, synthetic construct
  source 1..20: mol_type = other DNA
ccccctagctttccaatggg

SEQ ID NO: 1706 - DNA, 20 bp, synthetic construct
  source 1..20: mol_type = other DNA
gtctccacataatcctattg

SEQ ID NO: 1707 - DNA, 20 bp, synthetic construct
  source 1..20: mol_type = other DNA
acatcccattaatcatcgct

SEQ ID NO: 1708 - DNA, 20 bp, synthetic construct
  source 1..20: mol_type = other DNA
tcagattacctgaaggtgta

SEQ ID NO: 1709 - DNA, 20 bp, synthetic construct
  source 1..20: mol_type = other DNA
agtggacagatacggtccgt

SEQ ID NO: 1710 - DNA, 20 bp, synthetic construct
  source 1..20: mol_type = other DNA
tcagttgtgagtagtgcctc

SEQ ID NO: 1711 - DNA, 20 bp, synthetic construct
  source 1..20: mol_type = other DNA
gcttaccagagatggtttcc

SEQ ID NO: 1712 - DNA, 20 bp, synthetic construct
  source 1..20: mol_type = other DNA
cgtagggcaaaagtaaggat

SEQ ID NO: 1713 - DNA, 20 bp, synthetic construct
  source 1..20: mol_type = other DNA
gtggcctgaaggaacggccc

SEQ ID NO: 1714 - DNA, 20 bp, synthetic construct
  source 1..20: mol_type = other DNA
gaccttcaattgatcagtct

SEQ ID NO: 1715 - DNA, 20 bp, synthetic construct
  source 1..20: mol_type = other DNA
cctgtctggtactcccatat

SEQ ID NO: 1716 - DNA, 20 bp, synthetic construct
  source 1..20: mol_type = other DNA
tcaatatgagggaagtctag

SEQ ID NO: 1717 - DNA, 20 bp, synthetic construct
  source 1..20: mol_type = other DNA
ttaactacataggcactcta

SEQ ID NO: 1718 - DNA, 20 bp, synthetic construct
  source 1..20: mol_type = other DNA
ctacaccgtgacaaaagagc

SEQ ID NO: 1719 - DNA, 20 bp, synthetic construct
  source 1..20: mol_type = other DNA
agcacaggtggatgtctgac

SEQ ID NO: 1720 - DNA, 20 bp, synthetic construct
  source 1..20: mol_type = other DNA
gtagttgtatcttgaatggg

SEQ ID NO: 1721 - DNA, 20 bp, synthetic construct
  source 1..20: mol_type = other DNA
catctggacctcagattgac

SEQ ID NO: 1722 - DNA, 20 bp, synthetic construct
  source 1..20: mol_type = other DNA
aacgacctaaagacctagca

SEQ ID NO: 1723 - DNA, 20 bp, synthetic construct
  source 1..20: mol_type = other DNA
cttgagtaactactcatgac

SEQ ID NO: 1724 - DNA, 20 bp, synthetic construct
  source 1..20: mol_type = other DNA
gacctataggacctcaggag

SEQ ID NO: 1725 - DNA, 20 bp, synthetic construct
  source 1..20: mol_type = other DNA
ctaactttatagtgtggatg

SEQ ID NO: 1726 - DNA, 20 bp, synthetic construct
  source 1..20: mol_type = other DNA
ccacacatataggctagcca

SEQ ID NO: 1727 - DNA, 20 bp, synthetic construct
  source 1..20: mol_type = other DNA
ggtcatcatattgaaccaat

SEQ ID NO: 1728 - DNA, 20 bp, synthetic construct
  source 1..20: mol_type = other DNA
gatttccttactgagtgagc

SEQ ID NO: 1729 - DNA, 20 bp, synthetic construct
  source 1..20: mol_type = other DNA
ggtagtctatatttggtaag

SEQ ID NO: 1730 - DNA, 20 bp, synthetic construct
  source 1..20: mol_type = other DNA
ttattggtcatctcgggtat

SEQ ID NO: 1731 - DNA, 20 bp, synthetic construct
  source 1..20: mol_type = other DNA
ctatttcagaccgaaggagt

SEQ ID NO: 1732 - DNA, 20 bp, synthetic construct
  source 1..20: mol_type = other DNA
gtaactggtaggatctatgg

SEQ ID NO: 1733 - DNA, 20 bp, synthetic construct
  source 1..20: mol_type = other DNA
tttttagggtagtgtcctga

SEQ ID NO: 1734 - DNA, 20 bp, synthetic construct
  source 1..20: mol_type = other DNA
cttagtgattggtggtttat

SEQ ID NO: 1735 - DNA, 20 bp, synthetic construct
  source 1..20: mol_type = other DNA
gggatttacccattgcaagt

SEQ ID NO: 1736 - DNA, 20 bp, synthetic construct
  source 1..20: mol_type = other DNA
gccatcctaatagttggagg

SEQ ID NO: 1737 - DNA, 20 bp, synthetic construct
  source 1..20: mol_type = other DNA
ggttaagtctgctctttcac

SEQ ID NO: 1738 - DNA, 20 bp, synthetic construct
  source 1..20: mol_type = other DNA
tcgcccgttacctcaattct

SEQ ID NO: 1739 - DNA, 20 bp, synthetic construct
  source 1..20: mol_type = other DNA
gctattacactggagtcctg

SEQ ID NO: 1740 - DNA, 20 bp, synthetic construct
  source 1..20: mol_type = other DNA
caatacaaaacgggcatgct

SEQ ID NO: 1741 - DNA, 20 bp, synthetic construct
  source 1..20: mol_type = other DNA
gatcattccctgtggtaaag

SEQ ID NO: 1742 - DNA, 20 bp, synthetic construct
  source 1..20: mol_type = other DNA
gcttaggcaatggacttagt

SEQ ID NO: 1743 - DNA, 20 bp, synthetic construct
  source 1..20: mol_type = other DNA
catacccagggtaggattca

SEQ ID NO: 1744 - DNA, 20 bp, synthetic construct
  source 1..20: mol_type = other DNA
ataacactaacgatgaactc

SEQ ID NO: 1745 - DNA, 20 bp, synthetic construct
  source 1..20: mol_type = other DNA
cctaaaatccccgaatggga

SEQ ID NO: 1746 - DNA, 20 bp, synthetic construct
  source 1..20: mol_type = other DNA
cccagttaatcagtgaacga

SEQ ID NO: 1747 - DNA, 20 bp, synthetic construct
  source 1..20: mol_type = other DNA
atgttccaacctgtcatggg

SEQ ID NO: 1748 - DNA, 20 bp, synthetic construct
  source 1..20: mol_type = other DNA
gatgagattaggcctaatct

SEQ ID NO: 1749 - DNA, 20 bp, synthetic construct
  source 1..20: mol_type = other DNA
ccatctactattaatgagct

SEQ ID NO: 1750 - DNA, 20 bp, synthetic construct
  source 1..20: mol_type = other DNA
tcaccatgggcagattgatc

SEQ ID NO: 1751 - DNA, 20 bp, synthetic construct
  source 1..20: mol_type = other DNA
caaaacatgttctgacctcg

SEQ ID NO: 1752 - DNA, 20 bp, synthetic construct
  source 1..20: mol_type = other DNA
ggcctttgggtcggatatag

SEQ ID NO: 1753 - DNA, 20 bp, synthetic construct
  source 1..20: mol_type = other DNA
cgtcaaactgacatctgctt

SEQ ID NO: 1754 - DNA, 20 bp, synthetic construct
  source 1..20: mol_type = other DNA
agttaacacctatcaagttg

SEQ ID NO: 1755 - DNA, 20 bp, synthetic construct
  source 1..20: mol_type = other DNA
ggccacctgacttcggccca

SEQ ID NO: 1756 - DNA, 20 bp, synthetic construct
  source 1..20: mol_type = other DNA
gacttccaactgatgcatca

SEQ ID NO: 1757 - DNA, 20 bp, synthetic construct
  source 1..20: mol_type = other DNA
gacccttctgtgaaagccta

SEQ ID NO: 1758 - DNA, 20 bp, synthetic construct
  source 1..20: mol_type = other DNA
gactgcatctcaatcctatg

SEQ ID NO: 1759 - DNA, 20 bp, synthetic construct
  source 1..20: mol_type = other DNA
gcccatatgcttgaacaatt

SEQ ID NO: 1760 - DNA, 20 bp, synthetic construct
  source 1..20: mol_type = other DNA
gtatcttaactggtgaactc

SEQ ID NO: 1761 - DNA, 20 bp, synthetic construct
  source 1..20: mol_type = other DNA
gcagtttggatggttgacct

SEQ ID NO: 1762 - DNA, 20 bp, synthetic construct
  source 1..20: mol_type = other DNA
gggtcgactgatggttaccc

SEQ ID NO: 1763 - DNA, 20 bp, synthetic construct
  source 1..20: mol_type = other DNA
ataggagctgaatagtaggg

SEQ ID NO: 1764 - DNA, 20 bp, synthetic construct
  source 1..20: mol_type = other DNA
tcaaagacctgtgagggtgc

SEQ ID NO: 1765 - DNA, 20 bp, synthetic construct
  source 1..20: mol_type = other DNA
ggtgagctgtttgaccagct

SEQ ID NO: 1766 - DNA, 20 bp, synthetic construct
  source 1..20: mol_type = other DNA
tcattttgggagtgctccac

SEQ ID NO: 1767 - DNA, 20 bp, synthetic construct
  source 1..20: mol_type = other DNA
ggagatccaacctgtgtgga

SEQ ID NO: 1768 - DNA, 20 bp, synthetic construct
  source 1..20: mol_type = other DNA
ctgcaggatagccattcgat

SEQ ID NO: 1769 - DNA, 20 bp, synthetic construct
  source 1..20: mol_type = other DNA
cattattcaattaagggtgg

SEQ ID NO: 1770 - DNA, 20 bp, synthetic construct
  source 1..20: mol_type = other DNA
catgtgttaacggaactgag

SEQ ID NO: 1771 - DNA, 20 bp, synthetic construct
  source 1..20: mol_type = other DNA
gtgcatagagcagactgtac

SEQ ID NO: 1772 - DNA, 20 bp, synthetic construct
  source 1..20: mol_type = other DNA
ggttttgagagctggacgga

SEQ ID NO: 1773 - DNA, 20 bp, synthetic construct
  source 1..20: mol_type = other DNA
ataggtaggtgatgaaggtc

SEQ ID NO: 1774 - DNA, 20 bp, synthetic construct
  source 1..20: mol_type = other DNA
gctgccagcttagagaatct

SEQ ID NO: 1775 - DNA, 20 bp, synthetic construct
  source 1..20: mol_type = other DNA
gttaactaaagagtactcct

SEQ ID NO: 1776 - DNA, 20 bp, synthetic construct
  source 1..20: mol_type = other DNA
gtaggagataggcagtgcat

SEQ ID NO: 1777 - DNA, 20 bp, synthetic construct
  source 1..20: mol_type = other DNA
aattatactgtcctacttcg

SEQ ID NO: 1778 - DNA, 20 bp, synthetic construct
  source 1..20: mol_type = other DNA
gtaccccagaaatagcccat

SEQ ID NO: 1779 - DNA, 20 bp, synthetic construct
  source 1..20: mol_type = other DNA
catcactagcctagtgatct

SEQ ID NO: 1780 - DNA, 20 bp, synthetic construct
  source 1..20: mol_type = other DNA
gggtgctgtcaactgtccca

SEQ ID NO: 1781 - DNA, 20 bp, synthetic construct
  source 1..20: mol_type = other DNA
ggcaaagtacatactgatcc

SEQ ID NO: 1782 - DNA, 20 bp, synthetic construct
  source 1..20: mol_type = other DNA
cctgtgcggtagcacttgcc

SEQ ID NO: 1783 - DNA, 20 bp, synthetic construct
  source 1..20: mol_type = other DNA
gggccaagcacataggtatc

SEQ ID NO: 1784 - DNA, 20 bp, synthetic construct
  source 1..20: mol_type = other DNA
cgtgcaaaacaagtttcgca

SEQ ID NO: 1785 - DNA, 20 bp, synthetic construct
  source 1..20: mol_type = other DNA
gaccacgataactgtagcgc

SEQ ID NO: 1786 - DNA, 20 bp, synthetic construct
  source 1..20: mol_type = other DNA
tcctggcaagtatgctagtc

SEQ ID NO: 1787 - DNA, 20 bp, synthetic construct
  source 1..20: mol_type = other DNA
actgatccattagataggct

SEQ ID NO: 1788 - DNA, 20 bp, synthetic construct
  source 1..20: mol_type = other DNA
agaacacttcgccgctgatt

SEQ ID NO: 1789 - DNA, 20 bp, synthetic construct
  source 1..20: mol_type = other DNA
aacataaggttcaaaagccg

SEQ ID NO: 1790 - DNA, 20 bp, synthetic construct
  source 1..20: mol_type = other DNA
catagatgatcccataatag

SEQ ID NO: 1791 - DNA, 20 bp, synthetic construct
  source 1..20: mol_type = other DNA
ccgaaagcactttgcatgag

SEQ ID NO: 1792 - DNA, 20 bp, synthetic construct
  source 1..20: mol_type = other DNA
atccttgatccagacaagtc

SEQ ID NO: 1793 - DNA, 20 bp, synthetic construct
  source 1..20: mol_type = other DNA
atcatacaggcatctcagcc

SEQ ID NO: 1794 - DNA, 20 bp, synthetic construct
  source 1..20: mol_type = other DNA
tgtcactgagggatccccaa

SEQ ID NO: 1795 - DNA, 20 bp, synthetic construct
  source 1..20: mol_type = other DNA
ggattcaatagtgtaggtga

SEQ ID NO: 1796 - DNA, 20 bp, synthetic construct
  source 1..20: mol_type = other DNA
gtacaatgcatgtgggcctc

SEQ ID NO: 1797 - DNA, 20 bp, synthetic construct
  source 1..20: mol_type = other DNA
actggcatattccgattata

SEQ ID NO: 1798 - DNA, 20 bp, synthetic construct
  source 1..20: mol_type = other DNA
cgtattggacctttcaatga

SEQ ID NO: 1799 - DNA, 20 bp, synthetic construct
  source 1..20: mol_type = other DNA
attgaagctggcaatatgtc

SEQ ID NO: 1800 - DNA, 20 bp, synthetic construct
  source 1..20: mol_type = other DNA
gcatgtacaaacgggctatg

SEQ ID NO: 1801 - DNA, 20 bp, synthetic construct
  source 1..20: mol_type = other DNA
ggaatcttgtagaggattgg

SEQ ID NO: 1802 - DNA, 20 bp, synthetic construct
  source 1..20: mol_type = other DNA
tcagcacttaggtagttcac

SEQ ID NO: 1803 - DNA, 20 bp, synthetic construct
  source 1..20: mol_type = other DNA
tgtcttttgacacgctgact

SEQ ID NO: 1804 - DNA, 20 bp, synthetic construct
  source 1..20: mol_type = other DNA
gtactcttgcccatggatgg

SEQ ID NO: 1805 - DNA, 20 bp, synthetic construct
  source 1..20: mol_type = other DNA
cccctgtggcttataggtgg

SEQ ID NO: 1806 - DNA, 20 bp, synthetic construct
  source 1..20: mol_type = other DNA
ggatgaacctgcttcacaca

SEQ ID NO: 1807 - DNA, 20 bp, synthetic construct
  source 1..20: mol_type = other DNA
cagatttgccaggtaaagcg

SEQ ID NO: 1808 - DNA, 20 bp, synthetic construct
  source 1..20: mol_type = other DNA
aactatcctgcatccgaggc

SEQ ID NO: 1809 - DNA, 20 bp, synthetic construct
  source 1..20: mol_type = other DNA
ggtcaaccaatttgctattc

SEQ ID NO: 1810 - DNA, 20 bp, synthetic construct
  source 1..20: mol_type = other DNA
ggtcttgggattatagtttg

SEQ ID NO: 1811 - DNA, 20 bp, synthetic construct
  source 1..20: mol_type = other DNA
ggagttcctaactctcaatc

SEQ ID NO: 1812 - DNA, 20 bp, synthetic construct
  source 1..20: mol_type = other DNA
tctactgaggaacccatcac

SEQ ID NO: 1813 - DNA, 20 bp, synthetic construct
  source 1..20: mol_type = other DNA
cgttgcataacatgtgtatt

SEQ ID NO: 1814 - DNA, 20 bp, synthetic construct
  source 1..20: mol_type = other DNA
tacacctgcaacaagccatc

SEQ ID NO: 1815 - DNA, 20 bp, synthetic construct
  source 1..20: mol_type = other DNA
gagcaaatcggcaaaggcat

SEQ ID NO: 1816 - DNA, 20 bp, synthetic construct
  source 1..20: mol_type = other DNA
ccaagtggcttgtggtgaaa

SEQ ID NO: 1817 - DNA, 20 bp, synthetic construct
  source 1..20: mol_type = other DNA
gaactacgaataattgcatg

SEQ ID NO: 1818 - DNA, 20 bp, synthetic construct
  source 1..20: mol_type = other DNA
caatggtttagtgtcatatg

SEQ ID NO: 1819 - DNA, 20 bp, synthetic construct
  source 1..20: mol_type = other DNA
agtagctgtttaggctggac

SEQ ID NO: 1820 - DNA, 20 bp, synthetic construct
  source 1..20: mol_type = other DNA
ttgccctgccactcccgtgg

SEQ ID NO: 1821 - DNA, 20 bp, synthetic construct
  source 1..20: mol_type = other DNA
gggatatatcacttggagct

SEQ ID NO: 1822 - DNA, 20 bp, synthetic construct
  source 1..20: mol_type = other DNA
cagattaggtatggaggcca

SEQ ID NO: 1823 - DNA, 20 bp, synthetic construct
  source 1..20: mol_type = other DNA
acggattagattctccaaca

SEQ ID NO: 1824 - DNA, 20 bp, synthetic construct
  source 1..20: mol_type = other DNA
aggacacatcaagctagcta

SEQ ID NO: 1825 - DNA, 20 bp, synthetic construct
  source 1..20: mol_type = other DNA
aagccctttgctttttcggg

SEQ ID NO: 1826 - DNA, 20 bp, synthetic construct
  source 1..20: mol_type = other DNA
gtgttttgacctaactggcc

SEQ ID NO: 1827 - DNA, 20 bp, synthetic construct
  source 1..20: mol_type = other DNA
cgtgggtatggttttcctct

SEQ ID NO: 1828 - DNA, 20 bp, synthetic construct
  source 1..20: mol_type = other DNA
tccaacgagtgataattcac

SEQ ID NO: 1829 - DNA, 20 bp, synthetic construct
  source 1..20: mol_type = other DNA
aattgatgcataagtaaggc

SEQ ID NO: 1830 - DNA, 20 bp, synthetic construct
  source 1..20: mol_type = other DNA
ataggcacttcgggcaaata

SEQ ID NO: 1831 - DNA, 20 bp, synthetic construct
  source 1..20: mol_type = other DNA
ggatttaggtgctacagtca

SEQ ID NO: 1832 - DNA, 20 bp, synthetic construct
  source 1..20: mol_type = other DNA
gttagcccaggtgatcagct

SEQ ID NO: 1833 - DNA, 20 bp, synthetic construct
  source 1..20: mol_type = other DNA
attgcaactaataaagggtc

SEQ ID NO: 1834 - DNA, 20 bp, synthetic construct
  source 1..20: mol_type = other DNA
gctctcatgtgagagtatga

SEQ ID NO: 1835 - DNA, 20 bp, synthetic construct
  source 1..20: mol_type = other DNA
tcatgaattcaggttgcccc

SEQ ID NO: 1836 - DNA, 20 bp, synthetic construct
  source 1..20: mol_type = other DNA
ctttggttggaagttagacc

SEQ ID NO: 1837 - DNA, 20 bp, synthetic construct
  source 1..20: mol_type = other DNA
ctgcttattgcaggcctagc

SEQ ID NO: 1838 - DNA, 20 bp, synthetic construct
  source 1..20: mol_type = other DNA
cagttgagaacggtattgag

SEQ ID NO: 1839 - DNA, 20 bp, synthetic construct
  source 1..20: mol_type = other DNA
gtctgtctttagggtcaccc

SEQ ID NO: 1840 - DNA, 20 bp, synthetic construct
  source 1..20: mol_type = other DNA
gctttaggatggtgtggatc

SEQ ID NO: 1841 - DNA, 20 bp, synthetic construct
  source 1..20: mol_type = other DNA
ctctcactgactagctttcg

SEQ ID NO: 1842 - DNA, 20 bp, synthetic construct
  source 1..20: mol_type = other DNA
cttaccgtctttaggaactt

SEQ ID NO: 1843 - DNA, 20 bp, synthetic construct
  source 1..20: mol_type = other DNA
ggacagcacaacccccgtgc

SEQ ID NO: 1844 - DNA, 20 bp, synthetic construct
  source 1..20: mol_type = other DNA
ccctacaatgcatacccaac

SEQ ID NO: 1845 - DNA, 20 bp, synthetic construct
  source 1..20: mol_type = other DNA
gagttatacacggaacccac

SEQ ID NO: 1846 - DNA, 20 bp, synthetic construct
  source 1..20: mol_type = other DNA
gtccaagacatgctagggac

SEQ ID NO: 1847 - DNA, 20 bp, synthetic construct
  source 1..20: mol_type = other DNA
caatctagttagaccaggca

SEQ ID NO: 1848 - DNA, 20 bp, synthetic construct
  source 1..20: mol_type = other DNA
atggactgccggcctggagc

SEQ ID NO: 1849 - DNA, 20 bp, synthetic construct
  source 1..20: mol_type = other DNA
gtgaactacttggagacctt

SEQ ID NO: 1850 - DNA, 20 bp, synthetic construct
  source 1..20: mol_type = other DNA
acgcaactgagacaatccat

SEQ ID NO: 1851 - DNA, 20 bp, synthetic construct
  source 1..20: mol_type = other DNA
gtggctgtgctggatattac

SEQ ID NO: 1852 - DNA, 20 bp, synthetic construct
  source 1..20: mol_type = other DNA
gagcaaaatggtcagtaccc

SEQ ID NO: 1853 - DNA, 20 bp, synthetic construct
  source 1..20: mol_type = other DNA
gataggtcagtcactcactg

SEQ ID NO: 1854 - DNA, 20 bp, synthetic construct
  source 1..20: mol_type = other DNA
ggatgcattggtgtcaagag

SEQ ID NO: 1855 - DNA, 20 bp, synthetic construct
  source 1..20: mol_type = other DNA
ggtttacacatgataggaac

SEQ ID NO: 1856 - DNA, 20 bp, synthetic construct
  source 1..20: mol_type = other DNA
aacaacggttgcagggacag

SEQ ID NO: 1857 - DNA, 20 bp, synthetic construct
  source 1..20: mol_type = other DNA
ccccgtgtacagtaagggcc

SEQ ID NO: 1858 - DNA, 20 bp, synthetic construct
  source 1..20: mol_type = other DNA
gtcttagtgccaaatatcca

SEQ ID NO: 1859 - DNA, 20 bp, synthetic construct
  source 1..20: mol_type = other DNA
tatttagaccacgataactg

SEQ ID NO: 1860 - DNA, 20 bp, synthetic construct
  source 1..20: mol_type = other DNA
tccctcttgtagatcctggc

SEQ ID NO: 1861 - DNA, 20 bp, synthetic construct
  source 1..20: mol_type = other DNA
gagatatgattagtactgga

SEQ ID NO: 1862 - DNA, 20 bp, synthetic construct
  source 1..20: mol_type = other DNA
gagatagaacacttcgccgc

SEQ ID NO: 1863 - DNA, 20 bp, synthetic construct
  source 1..20: mol_type = other DNA
gtgattaggcggccgggcgc

SEQ ID NO: 1864 - DNA, 20 bp, synthetic construct
  source 1..20: mol_type = other DNA
cttatggagacttatatacc

SEQ ID NO: 1865 - DNA, 20 bp, synthetic construct
  source 1..20: mol_type = other DNA
gggtagaagactagcataca

SEQ ID NO: 1866 - DNA, 20 bp, synthetic construct
  source 1..20: mol_type = other DNA
gtacttatccttgatccaga

SEQ ID NO: 1867 - DNA, 20 bp, synthetic construct
  source 1..20: mol_type = other DNA
agcacaagattggttccatt

SEQ ID NO: 1868 - DNA, 20 bp, synthetic construct
  source 1..20: mol_type = other DNA
gggtactatgttgtcactga

SEQ ID NO: 1869 - DNA, 20 bp, synthetic construct
  source 1..20: mol_type = other DNA
atgaaccatggagtctctat

SEQ ID NO: 1870 - DNA, 20 bp, synthetic construct
  source 1..20: mol_type = other DNA
ggctttatactttacccaac

SEQ ID NO: 1871 - DNA, 20 bp, synthetic construct
  source 1..20: mol_type = other DNA
gtagataactttaccttgac

SEQ ID NO: 1872 - DNA, 20 bp, synthetic construct
  source 1..20: mol_type = other DNA
gtttatagggtggttggttc

SEQ ID NO: 1873 - DNA, 20 bp, synthetic construct
  source 1..20: mol_type = other DNA
gggttactttccaatagagt

SEQ ID NO: 1874 - DNA, 20 bp, synthetic construct
  source 1..20: mol_type = other DNA
aggcatgtacaaacgggcta

SEQ ID NO: 1875 - DNA, 20 bp, synthetic construct
  source 1..20: mol_type = other DNA
gttctggaatcttgtagagg

SEQ ID NO: 1876 - DNA, 20 bp, synthetic construct
  source 1..20: mol_type = other DNA
cccattcagcacttaggtag

SEQ ID NO: 1877 - DNA, 20 bp, synthetic construct
  source 1..20: mol_type = other DNA
ctgctcaaatctgcgaatag

SEQ ID NO: 1878 - DNA, 20 bp, synthetic construct
  source 1..20: mol_type = other DNA
gaggatggtgtgtatgttat

SEQ ID NO: 1879 - DNA, 20 bp, synthetic construct
  source 1..20: mol_type = other DNA
tcccacaaggtactcttgcc

SEQ ID NO: 1880 - DNA, 20 bp, synthetic construct
  source 1..20: mol_type = other DNA
gcatcccctgtggcttatag

SEQ ID NO: 1881 - DNA, 20 bp, synthetic construct
  source 1..20: mol_type = other DNA
tcagttagtcaggttaggga

SEQ ID NO: 1882 - DNA, 20 bp, synthetic construct
  source 1..20: mol_type = other DNA
agctattgcagctatgggtt

SEQ ID NO: 1883 - DNA, 20 bp, synthetic construct
  source 1..20: mol_type = other DNA
gttcaaccatcgagatgatc

SEQ ID NO: 1884 - DNA, 20 bp, synthetic construct
  source 1..20: mol_type = other DNA
gatagggtttaggtcaacca

SEQ ID NO: 1885 - DNA, 20 bp, synthetic construct
  source 1..20: mol_type = other DNA
atctggtcttgggattatag

SEQ ID NO: 1886 - DNA, 20 bp, synthetic construct
  source 1..20: mol_type = other DNA
cttaggagttcctaactctc

SEQ ID NO: 1887 - DNA, 20 bp, synthetic construct
  source 1..20: mol_type = other DNA
gttttggagattgtgttacg

SEQ ID NO: 1888 - DNA, 20 bp, synthetic construct
  source 1..20: mol_type = other DNA
ggagccaggtagagttaacg

SEQ ID NO: 1889 - DNA, 20 bp, synthetic construct
  source 1..20: mol_type = other DNA
ggatagttgtgaacaacttc

SEQ ID NO: 1890 - DNA, 20 bp, synthetic construct
  source 1..20: mol_type = other DNA
cattgaatgagggcccaaac

SEQ ID NO: 1891 - DNA, 20 bp, synthetic construct
  source 1..20: mol_type = other DNA
ggacttgtcttatggctgcc

SEQ ID NO: 1892 - DNA, 20 bp, synthetic construct
  source 1..20: mol_type = other DNA
tgattattcagagaactacg

SEQ ID NO: 1893 - DNA, 20 bp, synthetic construct
  source 1..20: mol_type = other DNA
cgttggcatttaagtctgag

SEQ ID NO: 1894 - DNA, 20 bp, synthetic construct
  source 1..20: mol_type = other DNA
ctgggttgagactattcagg

SEQ ID NO: 1895 - DNA, 20 bp, synthetic construct
  source 1..20: mol_type = other DNA
ccattgaagaaaaacccgcg

SEQ ID NO: 1896 - DNA, 20 bp, synthetic construct
  source 1..20: mol_type = other DNA
gcactactgtaagggtcatg

SEQ ID NO: 1897 - DNA, 20 bp, synthetic construct
  source 1..20: mol_type = other DNA
acaagggtagtgttacactg

SEQ ID NO: 1898 - DNA, 20 bp, synthetic construct
  source 1..20: mol_type = other DNA
caatggtaatcgcatatact

SEQ ID NO: 1899 - DNA, 20 bp, synthetic construct
  source 1..20: mol_type = other DNA
gactaatcctcttaagttca

SEQ ID NO: 1900 - DNA, 20 bp, synthetic construct
  source 1..20: mol_type = other DNA
aggtactgtaagccctttgc

SEQ ID NO: 1901 - DNA, 20 bp, synthetic construct
  source 1..20: mol_type = other DNA
aacttttacacgctagtggg

SEQ ID NO: 1902 - DNA, 20 bp, synthetic construct
  source 1..20: mol_type = other DNA
ccctttgttcatactgaacg

SEQ ID NO: 1903 - DNA, 20 bp, synthetic construct
  source 1..20: mol_type = other DNA
agcttccctccaacgagtga

SEQ ID NO: 1904 - DNA, 20 bp, synthetic construct
  source 1..20: mol_type = other DNA
ggcccaagggaattgatgca

SEQ ID NO: 1905 - DNA, 20 bp, synthetic construct
  source 1..20: mol_type = other DNA
aggaataggcacttcgggca

SEQ ID NO: 1906 - DNA, 20 bp, synthetic construct
  source 1..20: mol_type = other DNA
ggaacccaggatttaggtgc

SEQ ID NO: 1907 - DNA, 20 bp, synthetic construct
  source 1..20: mol_type = other DNA
ggtcataggagtgttagccc

SEQ ID NO: 1908 - DNA, 20 bp, synthetic construct
  source 1..20: mol_type = other DNA
ggttggattgctttattgca

SEQ ID NO: 1909 - DNA, 20 bp, synthetic construct
  source 1..20: mol_type = other DNA
gcctgctctcatgtgagagt

SEQ ID NO: 1910 - DNA, 20 bp, synthetic construct
  source 1..20: mol_type = other DNA
cgcttggctgacatttaggg

SEQ ID NO: 1911 - DNA, 20 bp, synthetic construct
  source 1..20: mol_type = other DNA
accgagctcaagaactgtga

SEQ ID NO: 1912 - DNA, 20 bp, synthetic construct
  source 1..20: mol_type = other DNA
tggcctgcttattgcaggcc

SEQ ID NO: 1913 - DNA, 20 bp, synthetic construct
  source 1..20: mol_type = other DNA
gttttcagttgagaacggta

SEQ ID NO: 1914 - DNA, 20 bp, synthetic construct
  source 1..20: mol_type = other DNA
gggacctccttatattcacc

SEQ ID NO: 1915 - DNA, 20 bp, synthetic construct
  source 1..20: mol_type = other DNA
cccctgctttaggatggtgt

SEQ ID NO: 1916 - DNA, 20 bp, synthetic construct
  source 1..20: mol_type = other DNA
ggtccccccagaaggcttga

SEQ ID NO: 1917 - DNA, 20 bp, synthetic construct
  source 1..20: mol_type = other DNA
tattcttaccgtctttagga

SEQ ID NO: 1918 - DNA, 20 bp, synthetic construct
  source 1..20: mol_type = other DNA
ggatggagctgttgtggcat

SEQ ID NO: 1919 - DNA, 20 bp, synthetic construct
  source 1..20: mol_type = other DNA
gcattaccctacaatgcata

SEQ ID NO: 1920 - DNA, 20 bp, synthetic construct
  source 1..20: mol_type = other DNA
gcatttgagagttatacacg

SEQ ID NO: 1921 - DNA, 20 bp, synthetic construct
  source 1..20: mol_type = other DNA
gggccttatagaccatacca

SEQ ID NO: 1922 - DNA, 20 bp, synthetic construct
  source 1..20: mol_type = other DNA
ggagacaatctagttagacc

SEQ ID NO: 1923 - DNA, 20 bp, synthetic construct
  source 1..20: mol_type = other DNA
gcacaaatggactgccggcc

SEQ ID NO: 1924 - DNA, 20 bp, synthetic construct
  source 1..20: mol_type = other DNA
gagagtcatactcctgacag

SEQ ID NO: 1925 - DNA, 20 bp, synthetic construct
  source 1..20: mol_type = other DNA
ctccgggctcaccacctggt

SEQ ID NO: 1926 - DNA, 20 bp, synthetic construct
  source 1..20: mol_type = other DNA
tctatacactgctgttgacg

SEQ ID NO: 1927 - DNA, 20 bp, synthetic construct
  source 1..20: mol_type = other DNA
gcttgctaaacctgtccatt

SEQ ID NO: 1928 - DNA, 20 bp, synthetic construct
  source 1..20: mol_type = other DNA
ctggatggtataaattgccc

SEQ ID NO: 1929 - DNA, 20 bp, synthetic construct
  source 1..20: mol_type = other DNA
gttgccgctttggtgaacct

SEQ ID NO: 1930 - DNA, 20 bp, synthetic construct
  source 1..20: mol_type = other DNA
gtgcactgatacagttgggc

SEQ ID NO: 1931 - DNA, 20 bp, synthetic construct
  source 1..20: mol_type = other DNA
ccatcaagtaggccagtcac

SEQ ID NO: 1932 - DNA, 20 bp, synthetic construct
  source 1..20: mol_type = other DNA
ggaataacccatacccccca

SEQ ID NO: 1933 - DNA, 20 bp, synthetic construct
  source 1..20: mol_type = other DNA
gcatgactcctaattgctgt

SEQ ID NO: 1934 - DNA, 20 bp, synthetic construct
  source 1..20: mol_type = other DNA
gagctcagtcttcactagtt

SEQ ID NO: 1935 - DNA, 20 bp, synthetic construct
  source 1..20: mol_type = other DNA
gtcaggcaccagattgctca

SEQ ID NO: 1936 - DNA, 20 bp, synthetic construct
  source 1..20: mol_type = other DNA
atgatcatactggagccagg

SEQ ID NO: 1937 - DNA, 20 bp, synthetic construct
  source 1..20: mol_type = other DNA
acctaccagagtggcatcct

SEQ ID NO: 1938 - DNA, 20 bp, synthetic construct
  source 1..20: mol_type = other DNA
acgctgtgtgaatcaaaagc

SEQ ID NO: 1939 - DNA, 20 bp, synthetic construct
  source 1..20: mol_type = other DNA
agtgttcttacatccaccgt

SEQ ID NO: 1940 - DNA, 20 bp, synthetic construct
  source 1..20: mol_type = other DNA
catgccaatcgcatgcaagc

SEQ ID NO: 1941 - DNA, 20 bp, synthetic construct
  source 1..20: mol_type = other DNA
gtcaggagttaactatgaac

SEQ ID NO: 1942 - DNA, 20 bp, synthetic construct
  source 1..20: mol_type = other DNA
caccagttaggcctgctccg

SEQ ID NO: 1943 - DNA, 20 bp, synthetic construct
  source 1..20: mol_type = other DNA
cgtttccacagccaggctta

SEQ ID NO: 1944 - DNA, 20 bp, synthetic construct
  source 1..20: mol_type = other DNA
agtcttgggtcactaggcac

SEQ ID NO: 1945 - DNA, 20 bp, synthetic construct
  source 1..20: mol_type = other DNA
ccaatattttgactagttcg

SEQ ID NO: 1946 - DNA, 20 bp, synthetic construct
  source 1..20: mol_type = other DNA
tttagtatgtcgagaactca

SEQ ID NO: 1947 - DNA, 20 bp, synthetic construct
  source 1..20: mol_type = other DNA
tgaaacctgtatagtttacc

SEQ ID NO: 1948 - DNA, 20 bp, synthetic construct
  source 1..20: mol_type = other DNA
ctaaccatagacagagtgca

SEQ ID NO: 1949 - DNA, 20 bp, synthetic construct
  source 1..20: mol_type = other DNA
catcatgatcttggtaaggc

SEQ ID NO: 1950 - DNA, 20 bp, synthetic construct
  source 1..20: mol_type = other DNA
gaccccacaatttggtccca

SEQ ID NO: 1951 - DNA, 20 bp, synthetic construct
  source 1..20: mol_type = other DNA
gactatctcagcactaggga

SEQ ID NO: 1952 - DNA, 20 bp, synthetic construct
  source 1..20: mol_type = other DNA
gccctgtagtatgtggatac

SEQ ID NO: 1953 - DNA, 20 bp, synthetic construct
  source 1..20: mol_type = other DNA
ctcgggtatataaattaatg

SEQ ID NO: 1954 - DNA, 20 bp, synthetic construct
  source 1..20: mol_type = other DNA
ggatctagaatgattggttg

SEQ ID NO: 1955 - DNA, 20 bp, synthetic construct
  source 1..20: mol_type = other DNA
gggctgctgtttgagtcccc

SEQ ID NO: 1956 - DNA, 20 bp, synthetic construct
  source 1..20: mol_type = other DNA
agatactcactcgcttttca

SEQ ID NO: 1957 - DNA, 20 bp, synthetic construct
  source 1..20: mol_type = other DNA
acgctccttcatttcatgca

SEQ ID NO: 1958 - DNA, 20 bp, synthetic construct
  source 1..20: mol_type = other DNA
gctgtaagtatagatgcctc

SEQ ID NO: 1959 - DNA, 20 bp, synthetic construct
  source 1..20: mol_type = other DNA
attagttgactctataaacg

SEQ ID NO: 1960 - DNA, 20 bp, synthetic construct
  source 1..20: mol_type = other DNA
aagtttggtattgacacctc

SEQ ID NO: 1961 - DNA, 20 bp, synthetic construct
  source 1..20: mol_type = other DNA
cttgatataagggtaatacg

SEQ ID NO: 1962 - DNA, 20 bp, synthetic construct
  source 1..20: mol_type = other DNA
ggctcaggcaaagtagcttc

SEQ ID NO: 1963 - DNA, 20 bp, synthetic construct
  source 1..20: mol_type = other DNA
gccatcttcaagactaaggt

SEQ ID NO: 1964 - DNA, 20 bp, synthetic construct
  source 1..20: mol_type = other DNA
cgaaaaatagtatgcgaagc

SEQ ID NO: 1965 - DNA, 20 bp, synthetic construct
  source 1..20: mol_type = other DNA
ggagaccctaaaaaacccgt

SEQ ID NO: 1966 - DNA, 20 bp, synthetic construct
  source 1..20: mol_type = other DNA
cctataggtggccttcagtc

SEQ ID NO: 1967 - DNA, 20 bp, synthetic construct
  source 1..20: mol_type = other DNA
ggcaagcccagactcatgct

SEQ ID NO: 1968 - DNA, 20 bp, synthetic construct
  source 1..20: mol_type = other DNA
cgtcaacactatagatgaat

SEQ ID NO: 1969 - DNA, 20 bp, synthetic construct
  source 1..20: mol_type = other DNA
ccactcatgtacatgagatc

SEQ ID NO: 1970 - DNA, 20 bp, synthetic construct
  source 1..20: mol_type = other DNA
ggcaagcaactatgggtgga

SEQ ID NO: 1971 - DNA, 20 bp, synthetic construct
  source 1..20: mol_type = other DNA
gtttacttcgggccaggtcc

SEQ ID NO: 1972 - DNA, 20 bp, synthetic construct
  source 1..20: mol_type = other DNA
acccctaggaataatgttgc

SEQ ID NO: 1973 - DNA, 20 bp, synthetic construct
  source 1..20: mol_type = other DNA
agcgatacaaacctacgcca

SEQ ID NO: 1974 - DNA, 20 bp, synthetic construct
  source 1..20: mol_type = other DNA
ggcaagtttttatcgcttaa

SEQ ID NO: 1975 - DNA, 20 bp, synthetic construct
  source 1..20: mol_type = other DNA
agtattttagccgggatacg

SEQ ID NO: 1976 - DNA, 20 bp, synthetic construct
  source 1..20: mol_type = other DNA
acgggttcctatttgtcagg

SEQ ID NO: 1977 - DNA, 20 bp, synthetic construct
  source 1..20: mol_type = other DNA
gtgagctttactctgcaata

SEQ ID NO: 1978 - DNA, 20 bp, synthetic construct
  source 1..20: mol_type = other DNA
gccttattggagagagaact

SEQ ID NO: 1979 - DNA, 20 bp, synthetic construct
  source 1..20: mol_type = other DNA
tcagtgctacccattagacc

SEQ ID NO: 1980 - DNA, 20 bp, synthetic construct
  source 1..20: mol_type = other DNA
catacatggaggagtccctg

SEQ ID NO: 1981 - DNA, 20 bp, synthetic construct
  source 1..20: mol_type = other DNA
tcctaaggatgtagcccatc

SEQ ID NO: 1982 - DNA, 20 bp, synthetic construct
  source 1..20: mol_type = other DNA
cgcatccagttaatctctga

SEQ ID NO: 1983 - DNA, 20 bp, synthetic construct
  source 1..20: mol_type = other DNA
gtcccagttggattaaggtg

SEQ ID NO: 1984 - DNA, 20 bp, synthetic construct
  source 1..20: mol_type = other DNA
ctgtacaggagggtgtctct

SEQ ID NO: 1985 - DNA, 20 bp, synthetic construct
  source 1..20: mol_type = other DNA
tagtctaaggcagtcagggt

SEQ ID NO: 1986 - DNA, 20 bp, synthetic construct
  source 1..20: mol_type = other DNA
atctagactctgcctggtta

SEQ ID NO: 1987 - DNA, 20 bp, synthetic construct
  source 1..20: mol_type = other DNA
ggacactctcgctgaggaca

SEQ ID NO: 1988 - DNA, 20 bp, synthetic construct
  source 1..20: mol_type = other DNA
ggcactatgaccacagggta

SEQ ID NO: 1989 - DNA, 20 bp, synthetic construct
  source 1..20: mol_type = other DNA
tctgctctgttagccgagca

SEQ ID NO: 1990 - DNA, 20 bp, synthetic construct
  source 1..20: mol_type = other DNA
gcacaatgcttgtatgcccc

SEQ ID NO: 1991 - DNA, 20 bp, synthetic construct
  source 1..20: mol_type = other DNA
gtgcccttactgttaaatcc

SEQ ID NO: 1992 - DNA, 20 bp, synthetic construct
  source 1..20: mol_type = other DNA
tttgctcaggatcgctggcc

SEQ ID NO: 1993 - DNA, 20 bp, synthetic construct
  source 1..20: mol_type = other DNA
agcctctgcctaaaggtagt

SEQ ID NO: 1994 - DNA, 20 bp, synthetic construct
  source 1..20: mol_type = other DNA
cgtgattgcaaagtccaagg

SEQ ID NO: 1995 - DNA, 20 bp, synthetic construct
  source 1..20: mol_type = other DNA
cagtagtggtatcaaatctg

SEQ ID NO: 1996 - DNA, 20 bp, synthetic construct
  source 1..20: mol_type = other DNA
tccagcacatagaccatagc

SEQ ID NO: 1997 - DNA, 20 bp, synthetic construct
  source 1..20: mol_type = other DNA
ggtggaaagtctagtatgtc

SEQ ID NO: 1998 - DNA, 20 bp, synthetic construct
  source 1..20: mol_type = other DNA
gacccatggaaagactcggg

SEQ ID NO: 1999 - DNA, 20 bp, synthetic construct
  source 1..20: mol_type = other DNA
gtttcccataggccacgctg

SEQ ID NO: 2000 - DNA, 20 bp, synthetic construct
  source 1..20: mol_type = other DNA
agtggttgctatcctgctaa

SEQ ID NO: 2001 - DNA, 20 bp, synthetic construct
  source 1..20: mol_type = other DNA
acgcaagtcctcctccgggc

SEQ ID NO: 2002 - DNA, 20 bp, synthetic construct
  source 1..20: mol_type = other DNA
tcaagggaactaactcctcc

SEQ ID NO: 2003 - DNA, 20 bp, synthetic construct
  source 1..20: mol_type = other DNA
gattgatcatgttatgccct

SEQ ID NO: 2004 - DNA, 20 bp, synthetic construct
  source 1..20: mol_type = other DNA
ggtggattggagttgctaca

SEQ ID NO: 2005 - DNA, 20 bp, synthetic construct
  source 1..20: mol_type = other DNA
tgggacacatatgttgccgc

SEQ ID NO: 2006 - DNA, 20 bp, synthetic construct
  source 1..20: mol_type = other DNA
ctgaagcaaagcttataggc

SEQ ID NO: 2007 - DNA, 20 bp, synthetic construct
  source 1..20: mol_type = other DNA
tgacactgagtaatctgcga

SEQ ID NO: 2008 - DNA, 20 bp, synthetic construct
  source 1..20: mol_type = other DNA
tgtaagattcccccaagggt

SEQ ID NO: 2009 - DNA, 20 bp, synthetic construct
  source 1..20: mol_type = other DNA
ggtgggattacatctcttat

SEQ ID NO: 2010 - DNA, 20 bp, synthetic construct
  source 1..20: mol_type = other DNA
cgtgatattcatgttgtctg

SEQ ID NO: 2011 - DNA, 20 bp, synthetic construct
  source 1..20: mol_type = other DNA
cgaagccaaaggtacttgag

SEQ ID NO: 2012 - DNA, 20 bp, synthetic construct
  source 1..20: mol_type = other DNA
gcttgcactccatcatataa

SEQ ID NO: 2013 - DNA, 20 bp, synthetic construct
  source 1..20: mol_type = other DNA
aggaccagccagtctagttt

SEQ ID NO: 2014 - DNA, 20 bp, synthetic construct
  source 1..20: mol_type = other DNA
ggtctcacgctgtgtgaatc

SEQ ID NO: 2015 - DNA, 20 bp, synthetic construct
  source 1..20: mol_type = other DNA
ggagtcaagttggttaatag

SEQ ID NO: 2016 - DNA, 20 bp, synthetic construct
  source 1..20: mol_type = other DNA
gggcgaaagtatatcaggca

SEQ ID NO: 2017 - DNA, 20 bp, synthetic construct
  source 1..20: mol_type = other DNA
ggctgtcaatgctgatatat

SEQ ID NO: 2018 - DNA, 20 bp, synthetic construct
  source 1..20: mol_type = other DNA
ggagttcaccagttaggcct

SEQ ID NO: 2019 - DNA, 20 bp, synthetic construct
  source 1..20: mol_type = other DNA
accctcccaacaaataagcg

SEQ ID NO: 2020 - DNA, 20 bp, synthetic construct
  source 1..20: mol_type = other DNA
agcaagtcttgggtcactag

SEQ ID NO: 2021 - DNA, 20 bp, synthetic construct
  source 1..20: mol_type = other DNA
ggcatcaatcaacaagcacc

SEQ ID NO: 2022 - DNA, 20 bp, synthetic construct
  source 1..20: mol_type = other DNA
gctttagtatgtcgagaact

SEQ ID NO: 2023 - DNA, 20 bp, synthetic construct
  source 1..20: mol_type = other DNA
gtggatggtatcctggtcaa

SEQ ID NO: 2024 - DNA, 20 bp, synthetic construct
  source 1..20: mol_type = other DNA
gcatgattctaaccatagac

SEQ ID NO: 2025 - DNA, 20 bp, synthetic construct
  source 1..20: mol_type = other DNA
gtactcatcatgatcttggt

SEQ ID NO: 2026 - DNA, 20 bp, synthetic construct
  source 1..20: mol_type = other DNA
ggaatagggctctgcttatt

SEQ ID NO: 2027 - DNA, 20 bp, synthetic construct
  source 1..20: mol_type = other DNA
cctcgaggatagtttcactg

SEQ ID NO: 2028 - DNA, 20 bp, synthetic construct
  source 1..20: mol_type = other DNA
catctcgggtatataaatta

SEQ ID NO: 2029 - DNA, 20 bp, synthetic construct
  source 1..20: mol_type = other DNA
tgttggatctagaatgattg

SEQ ID NO: 2030 - DNA, 20 bp, synthetic construct
  source 1..20: mol_type = other DNA
gtatgggctgctgtttgagt

SEQ ID NO: 2031 - DNA, 20 bp, synthetic construct
  source 1..20: mol_type = other DNA
ctgcagagatactcactcgc

SEQ ID NO: 2032 - DNA, 20 bp, synthetic construct
  source 1..20: mol_type = other DNA
ttgatacgctccttcatttc

SEQ ID NO: 2033 - DNA, 20 bp, synthetic construct
  source 1..20: mol_type = other DNA
atgctgtaagtatagatgcc

SEQ ID NO: 2034 - DNA, 20 bp, synthetic construct
  source 1..20: mol_type = other DNA
cgttgaatattagttgactc

SEQ ID NO: 2035 - DNA, 20 bp, synthetic construct
  source 1..20: mol_type = other DNA
ggtgttgtatgataatgtgt

SEQ ID NO: 2036 - DNA, 20 bp, synthetic construct
  source 1..20: mol_type = other DNA
caatagtagtgatgacttcc

SEQ ID NO: 2037 - DNA, 20 bp, synthetic construct
  source 1..20: mol_type = other DNA
agatggagcttgagccatcc

SEQ ID NO: 2038 - DNA, 20 bp, synthetic construct
  source 1..20: mol_type = other DNA
gccccacagtagaaatgtgg

SEQ ID NO: 2039 - DNA, 20 bp, synthetic construct
  source 1..20: mol_type = other DNA
agtcaacaagacaactcgat

SEQ ID NO: 2040 - DNA, 20 bp, synthetic construct
  source 1..20: mol_type = other DNA
cgttattcagtctcagggag

SEQ ID NO: 2041 - DNA, 20 bp, synthetic construct
  source 1..20: mol_type = other DNA
ctttcacctataggtggcct

SEQ ID NO: 2042 - DNA, 20 bp, synthetic construct
  source 1..20: mol_type = other DNA
gagtaatggacttctggtct

SEQ ID NO: 2043 - DNA, 20 bp, synthetic construct
  source 1..20: mol_type = other DNA
gtgtgagggaatctaagatc

SEQ ID NO: 2044 - DNA, 20 bp, synthetic construct
  source 1..20: mol_type = other DNA
ggtgccacaccatcaaaaga

SEQ ID NO: 2045 - DNA, 20 bp, synthetic construct
  source 1..20: mol_type = other DNA
gctgcagtggtaccacagac

SEQ ID NO: 2046 - DNA, 20 bp, synthetic construct
  source 1..20: mol_type = other DNA
aagaagtttacttcgggcca

SEQ ID NO: 2047 - DNA, 20 bp, synthetic construct
  source 1..20: mol_type = other DNA
tcgggagttgttagtccaag

SEQ ID NO: 2048 - DNA, 20 bp, synthetic construct
  source 1..20: mol_type = other DNA
gctcccaaacaactaatagt

SEQ ID NO: 2049 - DNA, 20 bp, synthetic construct
  source 1..20: mol_type = other DNA
tcaaaatcacgaaaggcggg

SEQ ID NO: 2050 - DNA, 20 bp, synthetic construct
  source 1..20: mol_type = other DNA
ttagaagtattttagccggg

SEQ ID NO: 2051 - DNA, 20 bp, synthetic construct
  source 1..20: mol_type = other DNA
ggtaggtaactacgggttcc

SEQ ID NO: 2052 - DNA, 20 bp, synthetic construct
  source 1..20: mol_type = other DNA
cacccctgtaaacagtgagc

SEQ ID NO: 2053 - DNA, 20 bp, synthetic construct
  source 1..20: mol_type = other DNA
ctgctcaagccttattggag

SEQ ID NO: 2054 - DNA, 20 bp, synthetic construct
  source 1..20: mol_type = other DNA
gtggaatcagtgctacccat

SEQ ID NO: 2055 - DNA, 20 bp, synthetic construct
  source 1..20: mol_type = other DNA
agctgggcactcatacatac

SEQ ID NO: 2056 - DNA, 20 bp, synthetic construct
  source 1..20: mol_type = other DNA
agcctcctaaggatgtagcc

SEQ ID NO: 2057 - DNA, 20 bp, synthetic construct
  source 1..20: mol_type = other DNA
atggtcctcgcatccagtta

SEQ ID NO: 2058 - DNA, 20 bp, synthetic construct
  source 1..20: mol_type = other DNA
cagcactgtcccagttggat

SEQ ID NO: 2059 - DNA, 20 bp, synthetic construct
  source 1..20: mol_type = other DNA
gttgattcactgcacactgt

SEQ ID NO: 2060 - DNA, 20 bp, synthetic construct
  source 1..20: mol_type = other DNA
ggtatattagtctaaggcag

SEQ ID NO: 2061 - DNA, 20 bp, synthetic construct
  source 1..20: mol_type = other DNA
gcgaagccttctcaaagact

SEQ ID NO: 2062 - DNA, 20 bp, synthetic construct
  source 1..20: mol_type = other DNA
gggccgcctctgttattgtg

SEQ ID NO: 2063 - DNA, 20 bp, synthetic construct
  source 1..20: mol_type = other DNA
gaactgtgggcactatgacc

SEQ ID NO: 2064 - DNA, 20 bp, synthetic construct
  source 1..20: mol_type = other DNA
cctttggagctttgactggc

SEQ ID NO: 2065 - DNA, 20 bp, synthetic construct
  source 1..20: mol_type = other DNA
cgatttcctgccagtggctg

SEQ ID NO: 2066 - DNA, 20 bp, synthetic construct
  source 1..20: mol_type = other DNA
ctactgtgcccttactgtta

SEQ ID NO: 2067 - DNA, 20 bp, synthetic construct
  source 1..20: mol_type = other DNA
gaagacttaggtctcaagct

SEQ ID NO: 2068 - DNA, 20 bp, synthetic construct
  source 1..20: mol_type = other DNA
gtagtcatgtagaacagcac

SEQ ID NO: 2069 - DNA, 20 bp, synthetic construct
  source 1..20: mol_type = other DNA
ccaccgtgattgcaaagtcc

SEQ ID NO: 2070 - DNA, 20 bp, synthetic construct
  source 1..20: mol_type = other DNA
gggcacagtagtggtatcaa

SEQ ID NO: 2071 - DNA, 20 bp, synthetic construct
  source 1..20: mol_type = other DNA
agagctgtcctaaggcaatt

SEQ ID NO: 2072 - DNA, 20 bp, synthetic construct
  source 1..20: mol_type = other DNA
cttgacatacaggataggtg

SEQ ID NO: 2073 - DNA, 20 bp, synthetic construct
  source 1..20: mol_type = other DNA
ttggtaaattagacccatgg

SEQ ID NO: 2074 - DNA, 20 bp, synthetic construct
  source 1..20: mol_type = other DNA
gatgtatgtttcccataggc

SEQ ID NO: 2075 - DNA, 20 bp, synthetic construct
  source 1..20: mol_type = other DNA
aagggtcttagtgccaaata

SEQ ID NO: 2076 - DNA, 20 bp, synthetic construct
  source 1..20: mol_type = other DNA
atgctagtcactcattgaga

SEQ ID NO: 2077 - DNA, 20 bp, synthetic construct
  source 1..20: mol_type = other DNA
tgatccattagataggctat

SEQ ID NO: 2078 - DNA, 20 bp, synthetic construct
  source 1..20: mol_type = other DNA
tctcacgctgtgtgaatcaa

SEQ ID NO: 2079 - DNA, 20 bp, synthetic construct
  source 1..20: mol_type = other DNA
agggaagtctaggtctcacg

SEQ ID NO: 2080 - DNA, 20 bp, synthetic construct
  source 1..20: mol_type = other DNA
gacccttatggagacttata

SEQ ID NO: 2081 - DNA, 20 bp, synthetic construct
  source 1..20: mol_type = other DNA
gtggactccacacacctact

SEQ ID NO: 2082 - DNA, 20 bp, synthetic construct
  source 1..20: mol_type = other DNA
gcaagcaaagactacaccgt

SEQ ID NO: 2083 - DNA, 20 bp, synthetic construct
  source 1..20: mol_type = other DNA
atattccctatccagggtag

SEQ ID NO: 2084 - DNA, 20 bp, synthetic construct
  source 1..20: mol_type = other DNA
aggtgtatattccctatcca

SEQ ID NO: 2085 - DNA, 20 bp, synthetic construct
  source 1..20: mol_type = other DNA
tgatattgcagtgggatggc

SEQ ID NO: 2086 - DNA, 20 bp, synthetic construct
  source 1..20: mol_type = other DNA
gcatggttatctaatgcatc

SEQ ID NO: 2087 - DNA, 20 bp, synthetic construct
  source 1..20: mol_type = other DNA
gagggatccccaaatagagc

SEQ ID NO: 2088 - DNA, 20 bp, synthetic construct
  source 1..20: mol_type = other DNA
atcacagttgcttgaccctt

SEQ ID NO: 2089 - DNA, 20 bp, synthetic construct
  source 1..20: mol_type = other DNA
tgatctattatgagggcatc

SEQ ID NO: 2090 - DNA, 20 bp, synthetic construct
  source 1..20: mol_type = other DNA
ttccctaatatagggcagat

SEQ ID NO: 2091 - DNA, 20 bp, synthetic construct
  source 1..20: mol_type = other DNA
ctataggacctcaggagatt

SEQ ID NO: 2092 - DNA, 20 bp, synthetic construct
  source 1..20: mol_type = other DNA
ctcaagacctataggacctc

SEQ ID NO: 2093 - DNA, 20 bp, synthetic construct
  source 1..20: mol_type = other DNA
tagtgtggatggtatcctgg

SEQ ID NO: 2094 - DNA, 20 bp, synthetic construct
  source 1..20: mol_type = other DNA
tagggtggttggttcaaaat

SEQ ID NO: 2095 - DNA, 20 bp, synthetic construct
  source 1..20: mol_type = other DNA
cacacatataggctagccaa

SEQ ID NO: 2096 - DNA, 20 bp, synthetic construct
  source 1..20: mol_type = other DNA
tgggttactttccaatagag

SEQ ID NO: 2097 - DNA, 20 bp, synthetic construct
  source 1..20: mol_type = other DNA
cttaggtagttcacaactct

SEQ ID NO: 2098 - DNA, 20 bp, synthetic construct
  source 1..20: mol_type = other DNA
cctgtagtatgtggatactg

SEQ ID NO: 2099 - DNA, 20 bp, synthetic construct
  source 1..20: mol_type = other DNA
ggatggtgtgtatgttatga

SEQ ID NO: 2100 - DNA, 20 bp, synthetic construct
  source 1..20: mol_type = other DNA
gtagtctattggtgttcctt

SEQ ID NO: 2101 - DNA, 20 bp, synthetic construct
  source 1..20: mol_type = other DNA
atacgctccttcatttcatg

SEQ ID NO: 2102 - DNA, 20 bp, synthetic construct
  source 1..20: mol_type = other DNA
gaattcaatggacccacatg

SEQ ID NO: 2103 - DNA, 20 bp, synthetic construct
  source 1..20: mol_type = other DNA
gggtaggattcatggtccaa

SEQ ID NO: 2104 - DNA, 20 bp, synthetic construct
  source 1..20: mol_type = other DNA
taatagactgcgattataca

SEQ ID NO: 2105 - DNA, 20 bp, synthetic construct
  source 1..20: mol_type = other DNA
ggcctaatctatgctgggcc

SEQ ID NO: 2106 - DNA, 20 bp, synthetic construct
  source 1..20: mol_type = other DNA
tgagattaggcctaatctat

SEQ ID NO: 2107 - DNA, 20 bp, synthetic construct
  source 1..20: mol_type = other DNA
gattaggtatggaggccatg

SEQ ID NO: 2108 - DNA, 20 bp, synthetic construct
  source 1..20: mol_type = other DNA
ccccaatacagattcagtgg

SEQ ID NO: 2109 - DNA, 20 bp, synthetic construct
  source 1..20: mol_type = other DNA
tcaaggtagccccaatacag

SEQ ID NO: 2110 - DNA, 20 bp, synthetic construct
  source 1..20: mol_type = other DNA
caagaggtactgtaagccct

SEQ ID NO: 2111 - DNA, 20 bp, synthetic construct
  source 1..20: mol_type = other DNA
tgttttgacctaactggcct

SEQ ID NO: 2112 - DNA, 20 bp, synthetic construct
  source 1..20: mol_type = other DNA
gctaagagtcacctgtatcc

SEQ ID NO: 2113 - DNA, 20 bp, synthetic construct
  source 1..20: mol_type = other DNA
aaggtattaaggcccttggc

SEQ ID NO: 2114 - DNA, 20 bp, synthetic construct
  source 1..20: mol_type = other DNA
ggtgatcagctcaacacccc

SEQ ID NO: 2115 - DNA, 20 bp, synthetic construct
  source 1..20: mol_type = other DNA
aggagtgttagcccaggtga

SEQ ID NO: 2116 - DNA, 20 bp, synthetic construct
  source 1..20: mol_type = other DNA
gggtcataggagtgttagcc

SEQ ID NO: 2117 - DNA, 20 bp, synthetic construct
  source 1..20: mol_type = other DNA
aaggtgatgacacccctacc

SEQ ID NO: 2118 - DNA, 20 bp, synthetic construct
  source 1..20: mol_type = other DNA
agctatttcattaagtcacc

SEQ ID NO: 2119 - DNA, 20 bp, synthetic construct
  source 1..20: mol_type = other DNA
gtatattagtctaaggcagt

SEQ ID NO: 2120 - DNA, 20 bp, synthetic construct
  source 1..20: mol_type = other DNA
tattatcttcttagggtcga

SEQ ID NO: 2121 - DNA, 20 bp, synthetic construct
  source 1..20: mol_type = other DNA
tgtgtaccgagctcaagaac

SEQ ID NO: 2122 - DNA, 20 bp, synthetic construct
  source 1..20: mol_type = other DNA
agtctgtctctgtgtaccga

SEQ ID NO: 2123 - DNA, 20 bp, synthetic construct
  source 1..20: mol_type = other DNA
gacactctcgctgaggacac

SEQ ID NO: 2124 - DNA, 20 bp, synthetic construct
  source 1..20: mol_type = other DNA
gccgcctctgttattgtgat

SEQ ID NO: 2125 - DNA, 20 bp, synthetic construct
  source 1..20: mol_type = other DNA
aaattgggccgcctctgtta

SEQ ID NO: 2126 - DNA, 20 bp, synthetic construct
  source 1..20: mol_type = other DNA
ctgtaggttgacaggacatg

SEQ ID NO: 2127 - DNA, 20 bp, synthetic construct
  source 1..20: mol_type = other DNA
tgagggtgcttagtgaactg

SEQ ID NO: 2128 - DNA, 20 bp, synthetic construct
  source 1..20: mol_type = other DNA
gagtctgtctttagggtcac

SEQ ID NO: 2129 - DNA, 20 bp, synthetic construct
  source 1..20: mol_type = other DNA
cgatacctgcttttgtgaca

SEQ ID NO: 2130 - DNA, 20 bp, synthetic construct
  source 1..20: mol_type = other DNA
atagccattcgatacctgct

SEQ ID NO: 2131 - DNA, 20 bp, synthetic construct
  source 1..20: mol_type = other DNA
actgcaggatagccattcga

SEQ ID NO: 2132 - DNA, 20 bp, synthetic construct
  source 1..20: mol_type = other DNA
tatgaatgccaccgtgattg

SEQ ID NO: 2133 - DNA, 20 bp, synthetic construct
  source 1..20: mol_type = other DNA
aactacataggcactctact

SEQ ID NO: 2134 - DNA, 20 bp, synthetic construct
  source 1..20: mol_type = other DNA
aacattcagctagactagtt

SEQ ID NO: 2135 - DNA, 20 bp, synthetic construct
  source 1..20: mol_type = other DNA
atgagaccccacaatttggt

SEQ ID NO: 2136 - DNA, 20 bp, synthetic construct
  source 1..20: mol_type = other DNA
atagaggccctcttgtttca

SEQ ID NO: 2137 - DNA, 20 bp, synthetic construct
  source 1..20: mol_type = other DNA
caattgtcagacttattgag

SEQ ID NO: 2138 - DNA, 20 bp, synthetic construct
  source 1..20: mol_type = other DNA
gaactcccacaaggtactct

SEQ ID NO: 2139 - DNA, 20 bp, synthetic construct
  source 1..20: mol_type = other DNA
ctgtagtatgcattgacaag

SEQ ID NO: 2140 - DNA, 20 bp, synthetic construct
  source 1..20: mol_type = other DNA
tactagggccagagaatcca

SEQ ID NO: 2141 - DNA, 20 bp, synthetic construct
  source 1..20: mol_type = other DNA
aagccactcatgtacatgag

SEQ ID NO: 2142 - DNA, 20 bp, synthetic construct
  source 1..20: mol_type = other DNA
aaactgggttgagactattc

SEQ ID NO: 2143 - DNA, 20 bp, synthetic construct
  source 1..20: mol_type = other DNA
ctgcagtggtaccacagacc

SEQ ID NO: 2144 - DNA, 20 bp, synthetic construct
  source 1..20: mol_type = other DNA
tgactacacatcttgtatac

SEQ ID NO: 2145 - DNA, 20 bp, synthetic construct
  source 1..20: mol_type = other DNA
ctaggcagctctttgtaggc

SEQ ID NO: 2146 - DNA, 20 bp, synthetic construct
  source 1..20: mol_type = other DNA
ccctataggtcaaaaatgcc

SEQ ID NO: 2147 - DNA, 20 bp, synthetic construct
  source 1..20: mol_type = other DNA
tcagtcaggtacaggtgttg

SEQ ID NO: 2148 - DNA, 20 bp, synthetic construct
  source 1..20: mol_type = other DNA
gtcaaagacctgtgagggtg

SEQ ID NO: 2149 - DNA, 20 bp, synthetic construct
  source 1..20: mol_type = other DNA
ggtctttgcagttaagttat

SEQ ID NO: 2150 - DNA, 20 bp, synthetic construct
  source 1..20: mol_type = other DNA
gggtcttagtgccaaatatc

SEQ ID NO: 2151 - DNA, 20 bp, synthetic construct
  source 1..20: mol_type = other DNA
gaagtctaggtctcacgctg

SEQ ID NO: 2152 - DNA, 20 bp, synthetic construct
  source 1..20: mol_type = other DNA
tacataggcactctactagc

SEQ ID NO: 2153 - DNA, 20 bp, synthetic construct
  source 1..20: mol_type = other DNA
cccttatggagacttatata

SEQ ID NO: 2154 - DNA, 20 bp, synthetic construct
  source 1..20: mol_type = other DNA
tgaagatttgacccttatgg

SEQ ID NO: 2155 - DNA, 20 bp, synthetic construct
  source 1..20: mol_type = other DNA
aagcaaagactacaccgtga

SEQ ID NO: 2156 - DNA, 20 bp, synthetic construct
  source 1..20: mol_type = other DNA
atccagggtagaagactagc

SEQ ID NO: 2157 - DNA, 20 bp, synthetic construct
  source 1..20: mol_type = other DNA
gtgtatattccctatccagg

SEQ ID NO: 2158 - DNA, 20 bp, synthetic construct
  source 1..20: mol_type = other DNA
ggatggctgtcaatgctgat

SEQ ID NO: 2159 - DNA, 20 bp, synthetic construct
  source 1..20: mol_type = other DNA
acaagtctactaccaataag

SEQ ID NO: 2160 - DNA, 20 bp, synthetic construct
  source 1..20: mol_type = other DNA
attctcatcatcgatccaaa

SEQ ID NO: 2161 - DNA, 20 bp, synthetic construct
  source 1..20: mol_type = other DNA
cacagttgcttgacccttaa

SEQ ID NO: 2162 - DNA, 20 bp, synthetic construct
  source 1..20: mol_type = other DNA
gattcaatagtgtaggtgac

SEQ ID NO: 2163 - DNA, 20 bp, synthetic construct
  source 1..20: mol_type = other DNA
cctaatatagggcagatgat

SEQ ID NO: 2164 - DNA, 20 bp, synthetic construct
  source 1..20: mol_type = other DNA
aggacctcaggagattgtac

SEQ ID NO: 2165 - DNA, 20 bp, synthetic construct
  source 1..20: mol_type = other DNA
caagacctataggacctcag

SEQ ID NO: 2166 - DNA, 20 bp, synthetic construct
  source 1..20: mol_type = other DNA
agactatcctggtatgactg

SEQ ID NO: 2167 - DNA, 20 bp, synthetic construct
  source 1..20: mol_type = other DNA
tgattgactacttcaacctg

SEQ ID NO: 2168 - DNA, 20 bp, synthetic construct
  source 1..20: mol_type = other DNA
cgtttatagggtggttggtt

SEQ ID NO: 2169 - DNA, 20 bp, synthetic construct
  source 1..20: mol_type = other DNA
cagctagactagttgaaatc

SEQ ID NO: 2170 - DNA, 20 bp, synthetic construct
  source 1..20: mol_type = other DNA
gagaccccacaatttggtcc

SEQ ID NO: 2171 - DNA, 20 bp, synthetic construct
  source 1..20: mol_type = other DNA
aggcagttgtgatagtcaac

SEQ ID NO: 2172 - DNA, 20 bp, synthetic construct
  source 1..20: mol_type = other DNA
ccattcagcacttaggtagt

SEQ ID NO: 2173 - DNA, 20 bp, synthetic construct
  source 1..20: mol_type = other DNA
tatgccctgtagtatgtgga

SEQ ID NO: 2174 - DNA, 20 bp, synthetic construct
  source 1..20: mol_type = other DNA
ttttattggtcatctcgggt

SEQ ID NO: 2175 - DNA, 20 bp, synthetic construct
  source 1..20: mol_type = other DNA
tcagacttattgaggatggt

SEQ ID NO: 2176 - DNA, 20 bp, synthetic construct
  source 1..20: mol_type = other DNA
actggtaggatctatggcag

SEQ ID NO: 2177 - DNA, 20 bp, synthetic construct
  source 1..20: mol_type = other DNA
cacagagtagtctattggtg

SEQ ID NO: 2178 - DNA, 20 bp, synthetic construct
  source 1..20: mol_type = other DNA
gtctccctcttagtgattgg

SEQ ID NO: 2179 - DNA, 20 bp, synthetic construct
  source 1..20: mol_type = other DNA
agtggttgccttagtattac

SEQ ID NO: 2180 - DNA, 20 bp, synthetic construct
  source 1..20: mol_type = other DNA
tgtaaatggcctgactaggc

SEQ ID NO: 2181 - DNA, 20 bp, synthetic construct
  source 1..20: mol_type = other DNA
ctaggaccagttggttcact

SEQ ID NO: 2182 - DNA, 20 bp, synthetic construct
  source 1..20: mol_type = other DNA
aatggaccacctaagacctc

SEQ ID NO: 2183 - DNA, 20 bp, synthetic construct
  source 1..20: mol_type = other DNA
taatctatgctgggccccaa

SEQ ID NO: 2184 - DNA, 20 bp, synthetic construct
  source 1..20: mol_type = other DNA
agattaggcctaatctatgc

SEQ ID NO: 2185 - DNA, 20 bp, synthetic construct
  source 1..20: mol_type = other DNA
gaccctcatcactttttgac

SEQ ID NO: 2186 - DNA, 20 bp, synthetic construct
  source 1..20: mol_type = other DNA
gcccggcaagagattcactt

SEQ ID NO: 2187 - DNA, 20 bp, synthetic construct
  source 1..20: mol_type = other DNA
aggtagccccaatacagatt

SEQ ID NO: 2188 - DNA, 20 bp, synthetic construct
  source 1..20: mol_type = other DNA
agggccatgttaaaggcctc

SEQ ID NO: 2189 - DNA, 20 bp, synthetic construct
  source 1..20: mol_type = other DNA
gacctaactggcctttgggt

SEQ ID NO: 2190 - DNA, 20 bp, synthetic construct
  source 1..20: mol_type = other DNA
tatgtggaatcagtgctacc

SEQ ID NO: 2191 - DNA, 20 bp, synthetic construct
  source 1..20: mol_type = other DNA
tatacaaggtattaaggccc

SEQ ID NO: 2192 - DNA, 20 bp, synthetic construct
  source 1..20: mol_type = other DNA
gcagctctttgtaggcccaa

SEQ ID NO: 2193 - DNA, 20 bp, synthetic construct
  source 1..20: mol_type = other DNA
gactaataggcctttctaca

SEQ ID NO: 2194 - DNA, 20 bp, synthetic construct
  source 1..20: mol_type = other DNA
gagtgttagcccaggtgatc

SEQ ID NO: 2195 - DNA, 20 bp, synthetic construct
  source 1..20: mol_type = other DNA
tcataggagtgttagcccag

SEQ ID NO: 2196 - DNA, 20 bp, synthetic construct
  source 1..20: mol_type = other DNA
gtgatgacacccctaccatg

SEQ ID NO: 2197 - DNA, 20 bp, synthetic construct
  source 1..20: mol_type = other DNA
gattaaggtgatgacacccc

SEQ ID NO: 2198 - DNA, 20 bp, synthetic construct
  source 1..20: mol_type = other DNA
caccaaccttaaatagtagg

SEQ ID NO: 2199 - DNA, 20 bp, synthetic construct
  source 1..20: mol_type = other DNA
tattagtctaaggcagtcag

SEQ ID NO: 2200 - DNA, 20 bp, synthetic construct
  source 1..20: mol_type = other DNA
ggagccttacgcttggctga

SEQ ID NO: 2201 - DNA, 20 bp, synthetic construct
  source 1..20: mol_type = other DNA
tgtaccgagctcaagaactg

SEQ ID NO: 2202 - DNA, 20 bp, synthetic construct
  source 1..20: mol_type = other DNA
tgtctctgtgtaccgagctc

SEQ ID NO: 2203 - DNA, 20 bp, synthetic construct
  source 1..20: mol_type = other DNA
cactctcgctgaggacacat

SEQ ID NO: 2204 - DNA, 20 bp, synthetic construct
  source 1..20: mol_type = other DNA
cgcctctgttattgtgatat

SEQ ID NO: 2205 - DNA, 20 bp, synthetic construct
  source 1..20: mol_type = other DNA
attgggccgcctctgttatt

SEQ ID NO: 2206 - DNA, 20 bp, synthetic construct
  source 1..20: mol_type = other DNA
tgtagaaattgggccgcctc

SEQ ID NO: 2207 - DNA, 20 bp, synthetic construct
  source 1..20: mol_type = other DNA
gtaggttgacaggacatgct

SEQ ID NO: 2208 - DNA, 20 bp, synthetic construct
  source 1..20: mol_type = other DNA
gggtgcttagtgaactgtgg

SEQ ID NO: 2209 - DNA, 20 bp, synthetic construct
  source 1..20: mol_type = other DNA
agacctgtgagggtgcttag

SEQ ID NO: 2210 - DNA, 20 bp, synthetic construct
  source 1..20: mol_type = other DNA
gtctaccagggtggtattat

SEQ ID NO: 2211 - DNA, 20 bp, synthetic construct
  source 1..20: mol_type = other DNA
tatatactccaggttgtgga

SEQ ID NO: 2212 - DNA, 20 bp, synthetic construct
  source 1..20: mol_type = other DNA
agccattcgatacctgcttt

SEQ ID NO: 2213 - DNA, 20 bp, synthetic construct
  source 1..20: mol_type = other DNA
gcaggatagccattcgatac

SEQ ID NO: 2214 - DNA, 20 bp, synthetic construct
  source 1..20: mol_type = other DNA
gaatgccaccgtgattgcaa

SEQ ID NO: 2215 - DNA, 20 bp, synthetic construct
  source 1..20: mol_type = other DNA
gcacatagaccatagctgaa

SEQ ID NO: 2216 - DNA, 20 bp, synthetic construct
  source 1..20: mol_type = other DNA
caatagaatagtgccagtag

SEQ ID NO: 2217 - DNA, 20 bp, synthetic construct
  source 1..20: mol_type = other DNA
tgatcatactggagccaggt

SEQ ID NO: 2218 - DNA, 20 bp, synthetic construct
  source 1..20: mol_type = other DNA
cacgctgtgtgaatcaaaag

SEQ ID NO: 2219 - DNA, 20 bp, synthetic construct
  source 1..20: mol_type = other DNA
gtgtttatccaaaccaaggg

SEQ ID NO: 2220 - DNA, 20 bp, synthetic construct
  source 1..20: mol_type = other DNA
ctcccacaaggtactcttgc

SEQ ID NO: 2221 - DNA, 20 bp, synthetic construct
  source 1..20: mol_type = other DNA
ggatgtcagttcagatgaac

SEQ ID NO: 2222 - DNA, 20 bp, synthetic construct
  source 1..20: mol_type = other DNA
caacatagatcctctgttag

SEQ ID NO: 2223 - DNA, 20 bp, synthetic construct
  source 1..20: mol_type = other DNA
ctgctccctaagcttagata

SEQ ID NO: 2224 - DNA, 20 bp, synthetic construct
  source 1..20: mol_type = other DNA
agtaaagagccacctaaggg

SEQ ID NO: 2225 - DNA, 20 bp, synthetic construct
  source 1..20: mol_type = other DNA
ggtcttagtgccaaatatcc

SEQ ID NO: 2226 - DNA, 20 bp, synthetic construct
  source 1..20: mol_type = other DNA
aatagtgccagtaggactta

SEQ ID NO: 2227 - DNA, 20 bp, synthetic construct
  source 1..20: mol_type = other DNA
caagtatgctagtcactcat

SEQ ID NO: 2228 - DNA, 20 bp, synthetic construct
  source 1..20: mol_type = other DNA
tctaggtctcacgctgtgtg

SEQ ID NO: 2229 - DNA, 20 bp, synthetic construct
  source 1..20: mol_type = other DNA
atagtgttcttacatccacc

SEQ ID NO: 2230 - DNA, 20 bp, synthetic construct
  source 1..20: mol_type = other DNA
ccttatggagacttatatac

SEQ ID NO: 2231 - DNA, 20 bp, synthetic construct
  source 1..20: mol_type = other DNA
gaagatttgacccttatgga

SEQ ID NO: 2232 - DNA, 20 bp, synthetic construct
  source 1..20: mol_type = other DNA
agcaaagactacaccgtgac

SEQ ID NO: 2233 - DNA, 20 bp, synthetic construct
  source 1..20: mol_type = other DNA
tgtatattccctatccaggg

SEQ ID NO: 2234 - DNA, 20 bp, synthetic construct
  source 1..20: mol_type = other DNA
gatggctgtcaatgctgata

SEQ ID NO: 2235 - DNA, 20 bp, synthetic construct
  source 1..20: mol_type = other DNA
tcatcatcgatccaaacaag

SEQ ID NO: 2236 - DNA, 20 bp, synthetic construct
  source 1..20: mol_type = other DNA
acagttgcttgacccttaat

SEQ ID NO: 2237 - DNA, 20 bp, synthetic construct
  source 1..20: mol_type = other DNA
tcaatagtgtaggtgacatg

SEQ ID NO: 2238 - DNA, 20 bp, synthetic construct
  source 1..20: mol_type = other DNA
atgtgggcctctattaagat

SEQ ID NO: 2239 - DNA, 20 bp, synthetic construct
  source 1..20: mol_type = other DNA
gacctcaggagattgtacaa

SEQ ID NO: 2240 - DNA, 20 bp, synthetic construct
  source 1..20: mol_type = other DNA
aagacctataggacctcagg

SEQ ID NO: 2241 - DNA, 20 bp, synthetic construct
  source 1..20: mol_type = other DNA
gactatcctggtatgactgt

SEQ ID NO: 2242 - DNA, 20 bp, synthetic construct
  source 1..20: mol_type = other DNA
gattgactacttcaacctga

SEQ ID NO: 2243 - DNA, 20 bp, synthetic construct
  source 1..20: mol_type = other DNA
tttatagggtggttggttca

SEQ ID NO: 2244 - DNA, 20 bp, synthetic construct
  source 1..20: mol_type = other DNA
ggatttaccacacatatagg

SEQ ID NO: 2245 - DNA, 20 bp, synthetic construct
  source 1..20: mol_type = other DNA
ggtaaggcagctcctgacaa

SEQ ID NO: 2246 - DNA, 20 bp, synthetic construct
  source 1..20: mol_type = other DNA
agaccccacaatttggtccc

SEQ ID NO: 2247 - DNA, 20 bp, synthetic construct
  source 1..20: mol_type = other DNA
gcacttaggtagttcacaac

SEQ ID NO: 2248 - DNA, 20 bp, synthetic construct
  source 1..20: mol_type = other DNA
tttattggtcatctcgggta

SEQ ID NO: 2249 - DNA, 20 bp, synthetic construct
  source 1..20: mol_type = other DNA
cagacttattgaggatggtg

SEQ ID NO: 2250 - DNA, 20 bp, synthetic construct
  source 1..20: mol_type = other DNA
ttaggacaagtcttatagag

SEQ ID NO: 2251 - DNA, 20 bp, synthetic construct
  source 1..20: mol_type = other DNA
ctggtaggatctatggcagt

SEQ ID NO: 2252 - DNA, 20 bp, synthetic construct
  source 1..20: mol_type = other DNA
acagagtagtctattggtgt

SEQ ID NO: 2253 - DNA, 20 bp, synthetic construct
  source 1..20: mol_type = other DNA
tctccctcttagtgattggt

SEQ ID NO: 2254 - DNA, 20 bp, synthetic construct
  source 1..20: mol_type = other DNA
ggcctgactaggcattgaat

SEQ ID NO: 2255 - DNA, 20 bp, synthetic construct
  source 1..20: mol_type = other DNA
tcatgtgcatacccagggta

SEQ ID NO: 2256 - DNA, 20 bp, synthetic construct
  source 1..20: mol_type = other DNA
taggaccagttggttcactg

SEQ ID NO: 2257 - DNA, 20 bp, synthetic construct
  source 1..20: mol_type = other DNA
atgttaatagactgcgatta

SEQ ID NO: 2258 - DNA, 20 bp, synthetic construct
  source 1..20: mol_type = other DNA
gctccctaagcttagatata

SEQ ID NO: 2259 - DNA, 20 bp, synthetic construct
  source 1..20: mol_type = other DNA
atggaccacctaagacctca

SEQ ID NO: 2260 - DNA, 20 bp, synthetic construct
  source 1..20: mol_type = other DNA
aatctatgctgggccccaat

SEQ ID NO: 2261 - DNA, 20 bp, synthetic construct
  source 1..20: mol_type = other DNA
gattaggcctaatctatgct

SEQ ID NO: 2262 - DNA, 20 bp, synthetic construct
  source 1..20: mol_type = other DNA
tccatctactattaatgagc

SEQ ID NO: 2263 - DNA, 20 bp, synthetic construct
  source 1..20: mol_type = other DNA
gattaggcagcttcactact

SEQ ID NO: 2264 - DNA, 20 bp, synthetic construct
  source 1..20: mol_type = other DNA
gtagccccaatacagattca

SEQ ID NO: 2265 - DNA, 20 bp, synthetic construct
  source 1..20: mol_type = other DNA
acctaactggcctttgggtc

SEQ ID NO: 2266 - DNA, 20 bp, synthetic construct
  source 1..20: mol_type = other DNA
tcaaggtgttttgacctaac

SEQ ID NO: 2267 - DNA, 20 bp, synthetic construct
  source 1..20: mol_type = other DNA
gatgggctaagagtcacctg

SEQ ID NO: 2268 - DNA, 20 bp, synthetic construct
  source 1..20: mol_type = other DNA
tacaaggtattaaggccctt

SEQ ID NO: 2269 - DNA, 20 bp, synthetic construct
  source 1..20: mol_type = other DNA
ctctttgtaggcccaaggga

SEQ ID NO: 2270 - DNA, 20 bp, synthetic construct
  source 1..20: mol_type = other DNA
aataggcacttcgggcaaat

SEQ ID NO: 2271 - DNA, 20 bp, synthetic construct
  source 1..20: mol_type = other DNA
agtgttagcccaggtgatca

SEQ ID NO: 2272 - DNA, 20 bp, synthetic construct
  source 1..20: mol_type = other DNA
cataggagtgttagcccagg

SEQ ID NO: 2273 - DNA, 20 bp, synthetic construct
  source 1..20: mol_type = other DNA
tgatgacacccctaccatgg

SEQ ID NO: 2274 - DNA, 20 bp, synthetic construct
  source 1..20: mol_type = other DNA
attaaggtgatgacacccct

SEQ ID NO: 2275 - DNA, 20 bp, synthetic construct
  source 1..20: mol_type = other DNA
attagtctaaggcagtcagg

SEQ ID NO: 2276 - DNA, 20 bp, synthetic construct
  source 1..20: mol_type = other DNA
gtaggtatattagtctaagg

SEQ ID NO: 2277 - DNA, 20 bp, synthetic construct
  source 1..20: mol_type = other DNA
gtaccgagctcaagaactgt

SEQ ID NO: 2278 - DNA, 20 bp, synthetic construct
  source 1..20: mol_type = other DNA
tctctgtgtaccgagctcaa

SEQ ID NO: 2279 - DNA, 20 bp, synthetic construct
  source 1..20: mol_type = other DNA
actctcgctgaggacacatc

SEQ ID NO: 2280 - DNA, 20 bp, synthetic construct
  source 1..20: mol_type = other DNA
aatgaggacactctcgctga

SEQ ID NO: 2281 - DNA, 20 bp, synthetic construct
  source 1..20: mol_type = other DNA
ttgggccgcctctgttattg

SEQ ID NO: 2282 - DNA, 20 bp, synthetic construct
  source 1..20: mol_type = other DNA
gtagaaattgggccgcctct

SEQ ID NO: 2283 - DNA, 20 bp, synthetic construct
  source 1..20: mol_type = other DNA
taggttgacaggacatgctg

SEQ ID NO: 2284 - DNA, 20 bp, synthetic construct
  source 1..20: mol_type = other DNA
gcttagtgaactgtgggcac

SEQ ID NO: 2285 - DNA, 20 bp, synthetic construct
  source 1..20: mol_type = other DNA
acctgtgagggtgcttagtg

SEQ ID NO: 2286 - DNA, 20 bp, synthetic construct
  source 1..20: mol_type = other DNA
ctaccagggtggtattataa

SEQ ID NO: 2287 - DNA, 20 bp, synthetic construct
  source 1..20: mol_type = other DNA
caggatagccattcgatacc

SEQ ID NO: 2288 - DNA, 20 bp, synthetic construct
  source 1..20: mol_type = other DNA
tgccaccgtgattgcaaagt

SEQ ID NO: 2289 - DNA, 20 bp, synthetic construct
  source 1..20: mol_type = other DNA
acatagaccatagctgaacc

SEQ ID NO: 2290 - DNA, 20 bp, synthetic construct
  source 1..20: mol_type = other DNA
ggcatccttaaatcctggtt

SEQ ID NO: 2291 - DNA, 20 bp, synthetic construct
  source 1..20: mol_type = other DNA
ccagggtagaagactagcat

SEQ ID NO: 2292 - DNA, 20 bp, synthetic construct
  source 1..20: mol_type = other DNA
gaaccctttggtctaagcaa

SEQ ID NO: 2293 - DNA, 20 bp, synthetic construct
  source 1..20: mol_type = other DNA
tatagattgggctttagagg

SEQ ID NO: 2294 - DNA, 20 bp, synthetic construct
  source 1..20: mol_type = other DNA
atgccctgtagtatgtggat

SEQ ID NO: 2295 - DNA, 20 bp, synthetic construct
  source 1..20: mol_type = other DNA
gtaatgctgttgtacactag

SEQ ID NO: 2296 - DNA, 20 bp, synthetic construct
  source 1..20: mol_type = other DNA
ttttgcataataggaggtcc

SEQ ID NO: 2297 - DNA, 20 bp, synthetic construct
  source 1..20: mol_type = other DNA
accaaccttaaatagtagga

SEQ ID NO: 2298 - DNA, 20 bp, synthetic construct
  source 1..20: mol_type = other DNA
tatactccaggttgtggagg

SEQ ID NO: 2299 - DNA, 20 bp, synthetic construct
  source 1..20: mol_type = other DNA
cattcgatacctgcttttgt

SEQ ID NO: 2300 - DNA, 20 bp, synthetic construct
  source 1..20: mol_type = other DNA
cgatccaaacaagcaccctc

SEQ ID NO: 2301 - DNA, 20 bp, synthetic construct
  source 1..20: mol_type = other DNA
atcgatccaaacaagcaccc

SEQ ID NO: 2302 - DNA, 20 bp, synthetic construct
  source 1..20: mol_type = other DNA
atcatcgatccaaacaagca

SEQ ID NO: 2303 - DNA, 20 bp, synthetic construct
  source 1..20: mol_type = other DNA
ccgcacatctggacctcaga

SEQ ID NO: 2304 - DNA, 20 bp, synthetic construct
  source 1..20: mol_type = other DNA
ggccgcacatctggacctca

SEQ ID NO: 2305 - DNA, 20 bp, synthetic construct
  source 1..20: mol_type = other DNA
gagggccgcacatctggacc

SEQ ID NO: 2306 - DNA, 20 bp, synthetic construct
  source 1..20: mol_type = other DNA
tggagggccgcacatctgga

SEQ ID NO: 2307 - DNA, 20 bp, synthetic construct
  source 1..20: mol_type = other DNA
attggagggccgcacatctg

SEQ ID NO: 2308 - DNA, 20 bp, synthetic construct
  source 1..20: mol_type = other DNA
ctattggagggccgcacatc

SEQ ID NO: 2309 - DNA, 20 bp, synthetic construct
  source 1..20: mol_type = other DNA
tcctattggagggccgcaca

SEQ ID NO: 2310 - DNA, 20 bp, synthetic construct
  source 1..20: mol_type = other DNA
ttgtcctattggagggccgc

SEQ ID NO: 2311 - DNA, 20 bp, synthetic construct
  source 1..20: mol_type = other DNA
atttgtcctattggagggcc

SEQ ID NO: 2312 - DNA, 20 bp, synthetic construct
  source 1..20: mol_type = other DNA
tatgttgtcactgagggatc

SEQ ID NO: 2313 - DNA, 20 bp, synthetic construct
  source 1..20: mol_type = other DNA
gtactatgttgtcactgagg

SEQ ID NO: 2314 - DNA, 20 bp, synthetic construct
  source 1..20: mol_type = other DNA
gccctcttcgaagagataga

SEQ ID NO: 2315 - DNA, 20 bp, synthetic construct
  source 1..20: mol_type = other DNA
ctgccctcttcgaagagata

SEQ ID NO: 2316 - DNA, 20 bp, synthetic construct
  source 1..20: mol_type = other DNA
gtcactaggcacactaaagt

SEQ ID NO: 2317 - DNA, 20 bp, synthetic construct
  source 1..20: mol_type = other DNA
gggtcactaggcacactaaa

SEQ ID NO: 2318 - DNA, 20 bp, synthetic construct
  source 1..20: mol_type = other DNA
aagtcttgggtcactaggca

SEQ ID NO: 2319 - DNA, 20 bp, synthetic construct
  source 1..20: mol_type = other DNA
gcaagtcttgggtcactagg

SEQ ID NO: 2320 - DNA, 20 bp, synthetic construct
  source 1..20: mol_type = other DNA
atggcttagctactcacccc

SEQ ID NO: 2321 - DNA, 20 bp, synthetic construct
  source 1..20: mol_type = other DNA
ataatggcttagctactcac

SEQ ID NO: 2322 - DNA, 20 bp, synthetic construct
  source 1..20: mol_type = other DNA
acgacctaaagacctagcaa

SEQ ID NO: 2323 - DNA, 20 bp, synthetic construct
  source 1..20: mol_type = other DNA
gatgtacaaaacgacctaaa

SEQ ID NO: 2324 - DNA, 20 bp, synthetic construct
  source 1..20: mol_type = other DNA
acaagtttcgcaataagatt

SEQ ID NO: 2325 - DNA, 20 bp, synthetic construct
  source 1..20: mol_type = other DNA
gcaagggtcttagtgccaaa

SEQ ID NO: 2326 - DNA, 20 bp, synthetic construct
  source 1..20: mol_type = other DNA
gtaggacttactaaatcatc

SEQ ID NO: 2327 - DNA, 20 bp, synthetic construct
  source 1..20: mol_type = other DNA
gccagtaggacttactaaat

SEQ ID NO: 2328 - DNA, 20 bp, synthetic construct
  source 1..20: mol_type = other DNA
gtgccagtaggacttactaa

SEQ ID NO: 2329 - DNA, 20 bp, synthetic construct
  source 1..20: mol_type = other DNA
aggattgcatcacatgtgtc

SEQ ID NO: 2330 - DNA, 20 bp, synthetic construct
  source 1..20: mol_type = other DNA
agcgcattgagcaaaattcc

SEQ ID NO: 2331 - DNA, 20 bp, synthetic construct
  source 1..20: mol_type = other DNA
gtagcgcattgagcaaaatt

SEQ ID NO: 2332 - DNA, 20 bp, synthetic construct
  source 1..20: mol_type = other DNA
ctgtagcgcattgagcaaaa

SEQ ID NO: 2333 - DNA, 20 bp, synthetic construct
  source 1..20: mol_type = other DNA
aactgtagcgcattgagcaa

SEQ ID NO: 2334 - DNA, 20 bp, synthetic construct
  source 1..20: mol_type = other DNA
gataactgtagcgcattgag

SEQ ID NO: 2335 - DNA, 20 bp, synthetic construct
  source 1..20: mol_type = other DNA
cacgataactgtagcgcatt

SEQ ID NO: 2336 - DNA, 20 bp, synthetic construct
  source 1..20: mol_type = other DNA
accacgataactgtagcgca

SEQ ID NO: 2337 - DNA, 20 bp, synthetic construct
  source 1..20: mol_type = other DNA
tagaccacgataactgtagc

SEQ ID NO: 2338 - DNA, 20 bp, synthetic construct
  source 1..20: mol_type = other DNA
tttagaccacgataactgta

SEQ ID NO: 2339 - DNA, 20 bp, synthetic construct
  source 1..20: mol_type = other DNA
gtatatttagaccacgataa

SEQ ID NO: 2340 - DNA, 20 bp, synthetic construct
  source 1..20: mol_type = other DNA
tctgtatatttagaccacga

SEQ ID NO: 2341 - DNA, 20 bp, synthetic construct
  source 1..20: mol_type = other DNA
gcaaggacccttaagtcata

SEQ ID NO: 2342 - DNA, 20 bp, synthetic construct
  source 1..20: mol_type = other DNA
caattgcaaggacccttaag

SEQ ID NO: 2343 - DNA, 20 bp, synthetic construct
  source 1..20: mol_type = other DNA
ttatcccaattgcaaggacc

SEQ ID NO: 2344 - DNA, 20 bp, synthetic construct
  source 1..20: mol_type = other DNA
agtcaggcaccagattgctc

SEQ ID NO: 2345 - DNA, 20 bp, synthetic construct
  source 1..20: mol_type = other DNA
aacgaagccaaaggtacttg

SEQ ID NO: 2346 - DNA, 20 bp, synthetic construct
  source 1..20: mol_type = other DNA
cggccctgactgtcattcat

SEQ ID NO: 2347 - DNA, 20 bp, synthetic construct
  source 1..20: mol_type = other DNA
aacggccctgactgtcattc

SEQ ID NO: 2348 - DNA, 20 bp, synthetic construct
  source 1..20: mol_type = other DNA
ggaacggccctgactgtcat

SEQ ID NO: 2349 - DNA, 20 bp, synthetic construct
  source 1..20: mol_type = other DNA
gaaggaacggccctgactgt

SEQ ID NO: 2350 - DNA, 20 bp, synthetic construct
  source 1..20: mol_type = other DNA
ctgaaggaacggccctgact

SEQ ID NO: 2351 - DNA, 20 bp, synthetic construct
  source 1..20: mol_type = other DNA
gcctgaaggaacggccctga

SEQ ID NO: 2352 - DNA, 20 bp, synthetic construct
  source 1..20: mol_type = other DNA
tgtggcctgaaggaacggcc

SEQ ID NO: 2353 - DNA, 20 bp, synthetic construct
  source 1..20: mol_type = other DNA
tcatgtggcctgaaggaacg

SEQ ID NO: 2354 - DNA, 20 bp, synthetic construct
  source 1..20: mol_type = other DNA
gataatcatgtggcctgaag

SEQ ID NO: 2355 - DNA, 20 bp, synthetic construct
  source 1..20: mol_type = other DNA
aacgataatcatgtggcctg

SEQ ID NO: 2356 - DNA, 20 bp, synthetic construct
  source 1..20: mol_type = other DNA
ataacgataatcatgtggcc

SEQ ID NO: 2357 - DNA, 20 bp, synthetic construct
  source 1..20: mol_type = other DNA
gtatgctagtcactcattga

SEQ ID NO: 2358 - DNA, 20 bp, synthetic construct
  source 1..20: mol_type = other DNA
tggcaagtatgctagtcact

SEQ ID NO: 2359 - DNA, 20 bp, synthetic construct
  source 1..20: mol_type = other DNA
cctggcaagtatgctagtca

SEQ ID NO: 2360 - DNA, 20 bp, synthetic construct
  source 1..20: mol_type = other DNA
gatcctggcaagtatgctag

SEQ ID NO: 2361 - DNA, 20 bp, synthetic construct
  source 1..20: mol_type = other DNA
tagatcctggcaagtatgct

SEQ ID NO: 2362 - DNA, 20 bp, synthetic construct
  source 1..20: mol_type = other DNA
tgtagatcctggcaagtatg

SEQ ID NO: 2363 - DNA, 20 bp, synthetic construct
  source 1..20: mol_type = other DNA
tcaacattatatcgatgcaa

SEQ ID NO: 2364 - DNA, 20 bp, synthetic construct
  source 1..20: mol_type = other DNA
cttgtcaacattatatcgat

SEQ ID NO: 2365 - DNA, 20 bp, synthetic construct
  source 1..20: mol_type = other DNA
aacttgtcaacattatatcg

SEQ ID NO: 2366 - DNA, 20 bp, synthetic construct
  source 1..20: mol_type = other DNA
gtttcgcaataagattccat

SEQ ID NO: 2367 - DNA, 20 bp, synthetic construct
  source 1..20: mol_type = other DNA
ttagctactcacccctgttc

SEQ ID NO: 2368 - DNA, 20 bp, synthetic construct
  source 1..20: mol_type = other DNA
agataatggcttagctactc

SEQ ID NO: 2369 - DNA, 20 bp, synthetic construct
  source 1..20: mol_type = other DNA
aaaacgacctaaagacctag

SEQ ID NO: 2370 - DNA, 20 bp, synthetic construct
  source 1..20: mol_type = other DNA
aggattcaatagtgtaggtg

SEQ ID NO: 2371 - DNA, 20 bp, synthetic construct
  source 1..20: mol_type = other DNA
gcacacctggatttcactac

SEQ ID NO: 2372 - DNA, 20 bp, synthetic construct
  source 1..20: mol_type = other DNA
ttggcacacctggatttcac

SEQ ID NO: 2373 - DNA, 20 bp, synthetic construct
  source 1..20: mol_type = other DNA
ataacttaccttgttgcaac

SEQ ID NO: 2374 - DNA, 20 bp, synthetic construct
  source 1..20: mol_type = other DNA
ttgagaagaaaaccctatcg

SEQ ID NO: 2375 - DNA, 20 bp, synthetic construct
  source 1..20: mol_type = other DNA
atatttagaccacgataact

SEQ ID NO: 2376 - DNA, 20 bp, synthetic construct
  source 1..20: mol_type = other DNA
ccctcttgtagatcctggca

SEQ ID NO: 2377 - DNA, 20 bp, synthetic construct
  source 1..20: mol_type = other DNA
aggtcttatttaccattggc

SEQ ID NO: 2378 - DNA, 20 bp, synthetic construct
  source 1..20: mol_type = other DNA
taatgatcatactggagcca

SEQ ID NO: 2379 - DNA, 20 bp, synthetic construct
  source 1..20: mol_type = other DNA
ctcacgctgtgtgaatcaaa

SEQ ID NO: 2380 - DNA, 20 bp, synthetic construct
  source 1..20: mol_type = other DNA
ggaagtctaggtctcacgct

SEQ ID NO: 2381 - DNA, 20 bp, synthetic construct
  source 1..20: mol_type = other DNA
ctacataggcactctactag

SEQ ID NO: 2382 - DNA, 20 bp, synthetic construct
  source 1..20: mol_type = other DNA
acccttatggagacttatat

SEQ ID NO: 2383 - DNA, 20 bp, synthetic construct
  source 1..20: mol_type = other DNA
gactccacacacctactaga

SEQ ID NO: 2384 - DNA, 20 bp, synthetic construct
  source 1..20: mol_type = other DNA
caagcaaagactacaccgtg

SEQ ID NO: 2385 - DNA, 20 bp, synthetic construct
  source 1..20: mol_type = other DNA
tatccagggtagaagactag

SEQ ID NO: 2386 - DNA, 20 bp, synthetic construct
  source 1..20: mol_type = other DNA
ggtgtatattccctatccag

SEQ ID NO: 2387 - DNA, 20 bp, synthetic construct
  source 1..20: mol_type = other DNA
agtgggatggctgtcaatgc

SEQ ID NO: 2388 - DNA, 20 bp, synthetic construct
  source 1..20: mol_type = other DNA
agggatccccaaatagagcc

SEQ ID NO: 2389 - DNA, 20 bp, synthetic construct
  source 1..20: mol_type = other DNA
tcacagttgcttgaccctta

SEQ ID NO: 2390 - DNA, 20 bp, synthetic construct
  source 1..20: mol_type = other DNA
tatgaaccatggagtctcta

SEQ ID NO: 2391 - DNA, 20 bp, synthetic construct
  source 1..20: mol_type = other DNA
tccctaatatagggcagatg

SEQ ID NO: 2392 - DNA, 20 bp, synthetic construct
  source 1..20: mol_type = other DNA
tataggacctcaggagattg

SEQ ID NO: 2393 - DNA, 20 bp, synthetic construct
  source 1..20: mol_type = other DNA
tcaagacctataggacctca

SEQ ID NO: 2394 - DNA, 20 bp, synthetic construct
  source 1..20: mol_type = other DNA
aaagactatcctggtatgac

SEQ ID NO: 2395 - DNA, 20 bp, synthetic construct
  source 1..20: mol_type = other DNA
gatttgagcctgctatgtct

SEQ ID NO: 2396 - DNA, 20 bp, synthetic construct
  source 1..20: mol_type = other DNA
acattcagctagactagttg

SEQ ID NO: 2397 - DNA, 20 bp, synthetic construct
  source 1..20: mol_type = other DNA
tgagaccccacaatttggtc

SEQ ID NO: 2398 - DNA, 20 bp, synthetic construct
  source 1..20: mol_type = other DNA
taggtagttcacaactcttc

SEQ ID NO: 2399 - DNA, 20 bp, synthetic construct
  source 1..20: mol_type = other DNA
atatgccctgtagtatgtgg

SEQ ID NO: 2400 - DNA, 20 bp, synthetic construct
  source 1..20: mol_type = other DNA
attttattggtcatctcggg

SEQ ID NO: 2401 - DNA, 20 bp, synthetic construct
  source 1..20: mol_type = other DNA
tgtcagacttattgaggatg

SEQ ID NO: 2402 - DNA, 20 bp, synthetic construct
  source 1..20: mol_type = other DNA
actcccacaaggtactcttg

SEQ ID NO: 2403 - DNA, 20 bp, synthetic construct
  source 1..20: mol_type = other DNA
aactggtaggatctatggca

SEQ ID NO: 2404 - DNA, 20 bp, synthetic construct
  source 1..20: mol_type = other DNA
ttcacagagtagtctattgg

SEQ ID NO: 2405 - DNA, 20 bp, synthetic construct
  source 1..20: mol_type = other DNA
tgtagtatgcattgacaagc

SEQ ID NO: 2406 - DNA, 20 bp, synthetic construct
  source 1..20: mol_type = other DNA
gagttacaagtgtcatatac

SEQ ID NO: 2407 - DNA, 20 bp, synthetic construct
  source 1..20: mol_type = other DNA
ggtaggattcatggtccaaa

SEQ ID NO: 2408 - DNA, 20 bp, synthetic construct
  source 1..20: mol_type = other DNA
cctaggaccagttggttcac

SEQ ID NO: 2409 - DNA, 20 bp, synthetic construct
  source 1..20: mol_type = other DNA
actgggttgagactattcag

SEQ ID NO: 2410 - DNA, 20 bp, synthetic construct
  source 1..20: mol_type = other DNA
caatggaccacctaagacct

SEQ ID NO: 2411 - DNA, 20 bp, synthetic construct
  source 1..20: mol_type = other DNA
ctaatctatgctgggcccca

SEQ ID NO: 2412 - DNA, 20 bp, synthetic construct
  source 1..20: mol_type = other DNA
gagattaggcctaatctatg

SEQ ID NO: 2413 - DNA, 20 bp, synthetic construct
  source 1..20: mol_type = other DNA
attaggtatggaggccatgt

SEQ ID NO: 2414 - DNA, 20 bp, synthetic construct
  source 1..20: mol_type = other DNA
aaggtagccccaatacagat

SEQ ID NO: 2415 - DNA, 20 bp, synthetic construct
  source 1..20: mol_type = other DNA
gaggtactgtaagccctttg

SEQ ID NO: 2416 - DNA, 20 bp, synthetic construct
  source 1..20: mol_type = other DNA
gttttgacctaactggcctt

SEQ ID NO: 2417 - DNA, 20 bp, synthetic construct
  source 1..20: mol_type = other DNA
ctaaggagtgctctttgtgg

SEQ ID NO: 2418 - DNA, 20 bp, synthetic construct
  source 1..20: mol_type = other DNA
aggtattaaggcccttggcc

SEQ ID NO: 2419 - DNA, 20 bp, synthetic construct
  source 1..20: mol_type = other DNA
gtatacaaggtattaaggcc

SEQ ID NO: 2420 - DNA, 20 bp, synthetic construct
  source 1..20: mol_type = other DNA
taggcagctctttgtaggcc

SEQ ID NO: 2421 - DNA, 20 bp, synthetic construct
  source 1..20: mol_type = other DNA
agttctgtatacaccatccc

SEQ ID NO: 2422 - DNA, 20 bp, synthetic construct
  source 1..20: mol_type = other DNA
ggagtgttagcccaggtgat

SEQ ID NO: 2423 - DNA, 20 bp, synthetic construct
  source 1..20: mol_type = other DNA
gtcataggagtgttagccca

SEQ ID NO: 2424 - DNA, 20 bp, synthetic construct
  source 1..20: mol_type = other DNA
ggtgatgacacccctaccat

SEQ ID NO: 2425 - DNA, 20 bp, synthetic construct
  source 1..20: mol_type = other DNA
gccttggttgtggtgaaacc

SEQ ID NO: 2426 - DNA, 20 bp, synthetic construct
  source 1..20: mol_type = other DNA
gtgaactcctgtgactgata

SEQ ID NO: 2427 - DNA, 20 bp, synthetic construct
  source 1..20: mol_type = other DNA
tatattagtctaaggcagtc

SEQ ID NO: 2428 - DNA, 20 bp, synthetic construct
  source 1..20: mol_type = other DNA
gtgtaccgagctcaagaact

SEQ ID NO: 2429 - DNA, 20 bp, synthetic construct
  source 1..20: mol_type = other DNA
ctgtctctgtgtaccgagct

SEQ ID NO: 2430 - DNA, 20 bp, synthetic construct
  source 1..20: mol_type = other DNA
ccgcctctgttattgtgata

SEQ ID NO: 2431 - DNA, 20 bp, synthetic construct
  source 1..20: mol_type = other DNA
aattgggccgcctctgttat

SEQ ID NO: 2432 - DNA, 20 bp, synthetic construct
  source 1..20: mol_type = other DNA
agtcaggtacaggtgttgga

SEQ ID NO: 2433 - DNA, 20 bp, synthetic construct
  source 1..20: mol_type = other DNA
tgtaggttgacaggacatgc

SEQ ID NO: 2434 - DNA, 20 bp, synthetic construct
  source 1..20: mol_type = other DNA
gagggtgcttagtgaactgt

SEQ ID NO: 2435 - DNA, 20 bp, synthetic construct
  source 1..20: mol_type = other DNA
aagacctgtgagggtgctta

SEQ ID NO: 2436 - DNA, 20 bp, synthetic construct
  source 1..20: mol_type = other DNA
agtctgtctttagggtcacc

SEQ ID NO: 2437 - DNA, 20 bp, synthetic construct
  source 1..20: mol_type = other DNA
tagccattcgatacctgctt

SEQ ID NO: 2438 - DNA, 20 bp, synthetic construct
  source 1..20: mol_type = other DNA
tgcaggatagccattcgata

SEQ ID NO: 2439 - DNA, 20 bp, synthetic construct
  source 1..20: mol_type = other DNA
atgaatgccaccgtgattgc

SEQ ID NO: 2440 - DNA, 20 bp, synthetic construct
  source 1..20: mol_type = other DNA
agttgtgtctgagggatatc

SEQ ID NO: 2441 - DNA, 20 bp, synthetic construct
  source 1..20: mol_type = other DNA
agggtcttagtgccaaatat

SEQ ID NO: 2442 - DNA, 20 bp, synthetic construct
  source 1..20: mol_type = other DNA
taccaaagtggctgctcacc

SEQ ID NO: 2443 - DNA, 20 bp, synthetic construct
  source 1..20: mol_type = other DNA
tagccctttcagcacacttc

SEQ ID NO: 2444 - DNA, 20 bp, synthetic construct
  source 1..20: mol_type = other DNA
ctggcaatatgtcaacctta

SEQ ID NO: 2445 - DNA, 20 bp, synthetic construct
  source 1..20: mol_type = other DNA
agtgcacagataatgactag

SEQ ID NO: 2446 - DNA, 20 bp, synthetic construct
  source 1..20: mol_type = other DNA
gacttgtcttatggctgcct

SEQ ID NO: 2447 - DNA, 20 bp, synthetic construct
  source 1..20: mol_type = other DNA
cctaatagcaccagaatagt

SEQ ID NO: 2448 - DNA, 20 bp, synthetic construct
  source 1..20: mol_type = other DNA
cccaatacagattcagtggc

SEQ ID NO: 2449 - DNA, 20 bp, synthetic construct
  source 1..20: mol_type = other DNA
tgaagtagtcctgccctttc

SEQ ID NO: 2450 - DNA, 20 bp, synthetic construct
  source 1..20: mol_type = other DNA
acactctcgctgaggacaca

SEQ ID NO: 2451 - DNA, 20 bp, synthetic construct
  source 1..20: mol_type = other DNA
gggcattcagtgctccctcc

SEQ ID NO: 2452 - DNA, 20 bp, synthetic construct
  source 1..20: mol_type = other DNA
caagggtcttagtgccaaat

SEQ ID NO: 2453 - DNA, 20 bp, synthetic construct
  source 1..20: mol_type = other DNA
tatgctagtcactcattgag

SEQ ID NO: 2454 - DNA, 20 bp, synthetic construct
  source 1..20: mol_type = other DNA
taggtctcacgctgtgtgaa

SEQ ID NO: 2455 - DNA, 20 bp, synthetic construct
  source 1..20: mol_type = other DNA
gagggaagtctaggtctcac

SEQ ID NO: 2456 - DNA, 20 bp, synthetic construct
  source 1..20: mol_type = other DNA
taactacataggcactctac

SEQ ID NO: 2457 - DNA, 20 bp, synthetic construct
  source 1..20: mol_type = other DNA
agatttgacccttatggaga

SEQ ID NO: 2458 - DNA, 20 bp, synthetic construct
  source 1..20: mol_type = other DNA
agtggactccacacacctac

SEQ ID NO: 2459 - DNA, 20 bp, synthetic construct
  source 1..20: mol_type = other DNA
tatattccctatccagggta

SEQ ID NO: 2460 - DNA, 20 bp, synthetic construct
  source 1..20: mol_type = other DNA
gacaggtgtatattccctat

SEQ ID NO: 2461 - DNA, 20 bp, synthetic construct
  source 1..20: mol_type = other DNA
tgtgcatggttatctaatgc

SEQ ID NO: 2462 - DNA, 20 bp, synthetic construct
  source 1..20: mol_type = other DNA
gttgcttgacccttaattca

SEQ ID NO: 2463 - DNA, 20 bp, synthetic construct
  source 1..20: mol_type = other DNA
catatcacagttgcttgacc

SEQ ID NO: 2464 - DNA, 20 bp, synthetic construct
  source 1..20: mol_type = other DNA
ttgatctattatgagggcat

SEQ ID NO: 2465 - DNA, 20 bp, synthetic construct
  source 1..20: mol_type = other DNA
cctcaggagattgtacaaca

SEQ ID NO: 2466 - DNA, 20 bp, synthetic construct
  source 1..20: mol_type = other DNA
ctatcctggtatgactgtca

SEQ ID NO: 2467 - DNA, 20 bp, synthetic construct
  source 1..20: mol_type = other DNA
atagtgtggatggtatcctg

SEQ ID NO: 2468 - DNA, 20 bp, synthetic construct
  source 1..20: mol_type = other DNA
tatagggtggttggttcaaa

SEQ ID NO: 2469 - DNA, 20 bp, synthetic construct
  source 1..20: mol_type = other DNA
accacacatataggctagcc

SEQ ID NO: 2470 - DNA, 20 bp, synthetic construct
  source 1..20: mol_type = other DNA
gaacattcagctagactagt

SEQ ID NO: 2471 - DNA, 20 bp, synthetic construct
  source 1..20: mol_type = other DNA
acttaggtagttcacaactc

SEQ ID NO: 2472 - DNA, 20 bp, synthetic construct
  source 1..20: mol_type = other DNA
ccctgtagtatgtggatact

SEQ ID NO: 2473 - DNA, 20 bp, synthetic construct
  source 1..20: mol_type = other DNA
ttggtcatctcgggtatata

SEQ ID NO: 2474 - DNA, 20 bp, synthetic construct
  source 1..20: mol_type = other DNA
cttattgaggatggtgtgta

SEQ ID NO: 2475 - DNA, 20 bp, synthetic construct
  source 1..20: mol_type = other DNA
tccctcttagtgattggtgg

SEQ ID NO: 2476 - DNA, 20 bp, synthetic construct
  source 1..20: mol_type = other DNA
ctaggcattgaatgagggcc

SEQ ID NO: 2477 - DNA, 20 bp, synthetic construct
  source 1..20: mol_type = other DNA
agggtaggattcatggtcca

SEQ ID NO: 2478 - DNA, 20 bp, synthetic construct
  source 1..20: mol_type = other DNA
ttaatagactgcgattatac

SEQ ID NO: 2479 - DNA, 20 bp, synthetic construct
  source 1..20: mol_type = other DNA
tccctaagcttagatatacc

SEQ ID NO: 2480 - DNA, 20 bp, synthetic construct
  source 1..20: mol_type = other DNA
gaccacctaagacctcaagg

SEQ ID NO: 2481 - DNA, 20 bp, synthetic construct
  source 1..20: mol_type = other DNA
ttaggcctaatctatgctgg

SEQ ID NO: 2482 - DNA, 20 bp, synthetic construct
  source 1..20: mol_type = other DNA
atgagattaggcctaatcta

SEQ ID NO: 2483 - DNA, 20 bp, synthetic construct
  source 1..20: mol_type = other DNA
agattaggtatggaggccat

SEQ ID NO: 2484 - DNA, 20 bp, synthetic construct
  source 1..20: mol_type = other DNA
gccccaatacagattcagtg

SEQ ID NO: 2485 - DNA, 20 bp, synthetic construct
  source 1..20: mol_type = other DNA
ggtgttttgacctaactggc

SEQ ID NO: 2486 - DNA, 20 bp, synthetic construct
  source 1..20: mol_type = other DNA
ggctaagagtcacctgtatc

SEQ ID NO: 2487 - DNA, 20 bp, synthetic construct
  source 1..20: mol_type = other DNA
caaggtattaaggcccttgg

SEQ ID NO: 2488 - DNA, 20 bp, synthetic construct
  source 1..20: mol_type = other DNA
ttgtaggcccaagggaattg

SEQ ID NO: 2489 - DNA, 20 bp, synthetic construct
  source 1..20: mol_type = other DNA
gctaggcagctctttgtagg

SEQ ID NO: 2490 - DNA, 20 bp, synthetic construct
  source 1..20: mol_type = other DNA
tgttagcccaggtgatcagc

SEQ ID NO: 2491 - DNA, 20 bp, synthetic construct
  source 1..20: mol_type = other DNA
taggagtgttagcccaggtg

SEQ ID NO: 2492 - DNA, 20 bp, synthetic construct
  source 1..20: mol_type = other DNA
agggtcataggagtgttagc

SEQ ID NO: 2493 - DNA, 20 bp, synthetic construct
  source 1..20: mol_type = other DNA
taaggtgatgacacccctac

SEQ ID NO: 2494 - DNA, 20 bp, synthetic construct
  source 1..20: mol_type = other DNA
gggtcagttgtgcagttgtt

SEQ ID NO: 2495 - DNA, 20 bp, synthetic construct
  source 1..20: mol_type = other DNA
aggtatattagtctaaggca

SEQ ID NO: 2496 - DNA, 20 bp, synthetic construct
  source 1..20: mol_type = other DNA
ctattatcttcttagggtcg

SEQ ID NO: 2497 - DNA, 20 bp, synthetic construct
  source 1..20: mol_type = other DNA
ctgtgtaccgagctcaagaa

SEQ ID NO: 2498 - DNA, 20 bp, synthetic construct
  source 1..20: mol_type = other DNA
catcagctgttagcagtctg

SEQ ID NO: 2499 - DNA, 20 bp, synthetic construct
  source 1..20: mol_type = other DNA
aggacactctcgctgaggac

SEQ ID NO: 2500 - DNA, 20 bp, synthetic construct
  source 1..20: mol_type = other DNA
ggccgcctctgttattgtga

SEQ ID NO: 2501 - DNA, 20 bp, synthetic construct
  source 1..20: mol_type = other DNA
gaaattgggccgcctctgtt

SEQ ID NO: 2502 - DNA, 20 bp, synthetic construct
  source 1..20: mol_type = other DNA
ctagcttccacctaagagct

SEQ ID NO: 2503 - DNA, 20 bp, synthetic construct
  source 1..20: mol_type = other DNA
aactctgtaggttgacagga

SEQ ID NO: 2504 - DNA, 20 bp, synthetic construct
  source 1..20: mol_type = other DNA
tgtgagggtgcttagtgaac

SEQ ID NO: 2505 - DNA, 20 bp, synthetic construct
  source 1..20: mol_type = other DNA
ctgtcaaagacctgtgaggg

SEQ ID NO: 2506 - DNA, 20 bp, synthetic construct
  source 1..20: mol_type = other DNA
ggatagccattcgatacctg

SEQ ID NO: 2507 - DNA, 20 bp, synthetic construct
  source 1..20: mol_type = other DNA
ttattcttaccgtctttagg

SEQ ID NO: 2508 - DNA, 20 bp, synthetic construct
  source 1..20: mol_type = other DNA
agctcatcacaactgggtgg

SEQ ID NO: 2509 - DNA, 20 bp, synthetic construct
  source 1..20: mol_type = other DNA
agagatatgattagtactgg

SEQ ID NO: 2510 - DNA, 20 bp, synthetic construct
  source 1..20: mol_type = other DNA
gtgatattgcagtgggatgg

SEQ ID NO: 2511 - DNA, 20 bp, synthetic construct
  source 1..20: mol_type = other DNA
acctataggacctcaggaga

SEQ ID NO: 2512 - DNA, 20 bp, synthetic construct
  source 1..20: mol_type = other DNA
actgggttactttccaatag

SEQ ID NO: 2513 - DNA, 20 bp, synthetic construct
  source 1..20: mol_type = other DNA
caatttacttgatacagggc

SEQ ID NO: 2514 - DNA, 20 bp, synthetic construct
  source 1..20: mol_type = other DNA
gtcaattgtcagacttattg

SEQ ID NO: 2515 - DNA, 20 bp, synthetic construct
  source 1..20: mol_type = other DNA
gggcctgtatgtcttgagaa

SEQ ID NO: 2516 - DNA, 20 bp, synthetic construct
  source 1..20: mol_type = other DNA
agtagtctattggtgttcct

SEQ ID NO: 2517 - DNA, 20 bp, synthetic construct
  source 1..20: mol_type = other DNA
atactgtagtatgcattgac

SEQ ID NO: 2518 - DNA, 20 bp, synthetic construct
  source 1..20: mol_type = other DNA
ttactagggccagagaatcc

SEQ ID NO: 2519 - DNA, 20 bp, synthetic construct
  source 1..20: mol_type = other DNA
cagatgactagcctccaaac

SEQ ID NO: 2520 - DNA, 20 bp, synthetic construct
  source 1..20: mol_type = other DNA
gcataataggaggtccttaa

SEQ ID NO: 2521 - DNA, 20 bp, synthetic construct
  source 1..20: mol_type = other DNA
gtcaaatcaatttgtgccac

SEQ ID NO: 2522 - DNA, 20 bp, synthetic construct
  source 1..20: mol_type = other DNA
ctaaggcagtcagggtaatg

SEQ ID NO: 2523 - DNA, 20 bp, synthetic construct
  source 1..20: mol_type = other DNA
ttaagaagcttgcctttcga

SEQ ID NO: 2524 - DNA, 20 bp, synthetic construct
  source 1..20: mol_type = other DNA
ttcgatacctgcttttgtga

SEQ ID NO: 2525 - DNA, 20 bp, synthetic construct
  source 1..20: mol_type = other DNA
ctgatgatttgttgattacc

SEQ ID NO: 2526 - DNA, 20 bp, synthetic construct
  source 1..20: mol_type = other DNA
atagtgccagtaggacttac

SEQ ID NO: 2527 - DNA, 20 bp, synthetic construct
  source 1..20: mol_type = other DNA
agtatgctagtcactcattg

SEQ ID NO: 2528 - DNA, 20 bp, synthetic construct
  source 1..20: mol_type = other DNA
ctaggtctcacgctgtgtga

SEQ ID NO: 2529 - DNA, 20 bp, synthetic construct
  source 1..20: mol_type = other DNA
tatgagggaagtctaggtct

SEQ ID NO: 2530 - DNA, 20 bp, synthetic construct
  source 1..20: mol_type = other DNA
aagatttgacccttatggag

SEQ ID NO: 2531 - DNA, 20 bp, synthetic construct
  source 1..20: mol_type = other DNA
gagtggactccacacaccta

SEQ ID NO: 2532 - DNA, 20 bp, synthetic construct
  source 1..20: mol_type = other DNA
gtatattccctatccagggt

SEQ ID NO: 2533 - DNA, 20 bp, synthetic construct
  source 1..20: mol_type = other DNA
tgacaggtgtatattcccta

SEQ ID NO: 2534 - DNA, 20 bp, synthetic construct
  source 1..20: mol_type = other DNA
agtgatattgcagtgggatg

SEQ ID NO: 2535 - DNA, 20 bp, synthetic construct
  source 1..20: mol_type = other DNA
catcatcgatccaaacaagc

SEQ ID NO: 2536 - DNA, 20 bp, synthetic construct
  source 1..20: mol_type = other DNA
cagttgcttgacccttaatt

SEQ ID NO: 2537 - DNA, 20 bp, synthetic construct
  source 1..20: mol_type = other DNA
acatggtgagggtctcaatg

SEQ ID NO: 2538 - DNA, 20 bp, synthetic construct
  source 1..20: mol_type = other DNA
acttgatctattatgagggc

SEQ ID NO: 2539 - DNA, 20 bp, synthetic construct
  source 1..20: mol_type = other DNA
acctcaggagattgtacaac

SEQ ID NO: 2540 - DNA, 20 bp, synthetic construct
  source 1..20: mol_type = other DNA
agacctataggacctcagga

SEQ ID NO: 2541 - DNA, 20 bp, synthetic construct
  source 1..20: mol_type = other DNA
actatcctggtatgactgtc

SEQ ID NO: 2542 - DNA, 20 bp, synthetic construct
  source 1..20: mol_type = other DNA
ttatagtgtggatggtatcc

SEQ ID NO: 2543 - DNA, 20 bp, synthetic construct
  source 1..20: mol_type = other DNA
ttatagggtggttggttcaa

SEQ ID NO: 2544 - DNA, 20 bp, synthetic construct
  source 1..20: mol_type = other DNA
taccacacatataggctagc

SEQ ID NO: 2545 - DNA, 20 bp, synthetic construct
  source 1..20: mol_type = other DNA
cctaaggtgaagtctgtgta

SEQ ID NO: 2546 - DNA, 20 bp, synthetic construct
  source 1..20: mol_type = other DNA
cacttaggtagttcacaact

SEQ ID NO: 2547 - DNA, 20 bp, synthetic construct
  source 1..20: mol_type = other DNA
tgccctgtagtatgtggata

SEQ ID NO: 2548 - DNA, 20 bp, synthetic construct
  source 1..20: mol_type = other DNA
tattggtcatctcgggtata

SEQ ID NO: 2549 - DNA, 20 bp, synthetic construct
  source 1..20: mol_type = other DNA
tggtaggatctatggcagtt

SEQ ID NO: 2550 - DNA, 20 bp, synthetic construct
  source 1..20: mol_type = other DNA
cagagtagtctattggtgtt

SEQ ID NO: 2551 - DNA, 20 bp, synthetic construct
  source 1..20: mol_type = other DNA
ctccctcttagtgattggtg

SEQ ID NO: 2552 - DNA, 20 bp, synthetic construct
  source 1..20: mol_type = other DNA
cctacccttgcatgctatgt

SEQ ID NO: 2553 - DNA, 20 bp, synthetic construct
  source 1..20: mol_type = other DNA
gcctgactaggcattgaatg

SEQ ID NO: 2554 - DNA, 20 bp, synthetic construct
  source 1..20: mol_type = other DNA
gttactagggccagagaatc

SEQ ID NO: 2555 - DNA, 20 bp, synthetic construct
  source 1..20: mol_type = other DNA
gttaatagactgcgattata

SEQ ID NO: 2556 - DNA, 20 bp, synthetic construct
  source 1..20: mol_type = other DNA
ctccctaagcttagatatac

SEQ ID NO: 2557 - DNA, 20 bp, synthetic construct
  source 1..20: mol_type = other DNA
attaggcctaatctatgctg

SEQ ID NO: 2558 - DNA, 20 bp, synthetic construct
  source 1..20: mol_type = other DNA
agatgagattaggcctaatc

SEQ ID NO: 2559 - DNA, 20 bp, synthetic construct
  source 1..20: mol_type = other DNA
acagattaggtatggaggcc

SEQ ID NO: 2560 - DNA, 20 bp, synthetic construct
  source 1..20: mol_type = other DNA
tagccccaatacagattcag

SEQ ID NO: 2561 - DNA, 20 bp, synthetic construct
  source 1..20: mol_type = other DNA
tgcataataggaggtcctta

SEQ ID NO: 2562 - DNA, 20 bp, synthetic construct
  source 1..20: mol_type = other DNA
tacttttggtaggtaactac

SEQ ID NO: 2563 - DNA, 20 bp, synthetic construct
  source 1..20: mol_type = other DNA
aggtgttttgacctaactgg

SEQ ID NO: 2564 - DNA, 20 bp, synthetic construct
  source 1..20: mol_type = other DNA
tgggctaagagtcacctgta

SEQ ID NO: 2565 - DNA, 20 bp, synthetic construct
  source 1..20: mol_type = other DNA
acaaggtattaaggcccttg

SEQ ID NO: 2566 - DNA, 20 bp, synthetic construct
  source 1..20: mol_type = other DNA
tttgtaggcccaagggaatt

SEQ ID NO: 2567 - DNA, 20 bp, synthetic construct
  source 1..20: mol_type = other DNA
gcccgatgacaccagccact

SEQ ID NO: 2568 - DNA, 20 bp, synthetic construct
  source 1..20: mol_type = other DNA
gtgttagcccaggtgatcag

SEQ ID NO: 2569 - DNA, 20 bp, synthetic construct
  source 1..20: mol_type = other DNA
ataggagtgttagcccaggt

SEQ ID NO: 2570 - DNA, 20 bp, synthetic construct
  source 1..20: mol_type = other DNA
gatgacacccctaccatggc

SEQ ID NO: 2571 - DNA, 20 bp, synthetic construct
  source 1..20: mol_type = other DNA
ttaaggtgatgacaccccta

SEQ ID NO: 2572 - DNA, 20 bp, synthetic construct
  source 1..20: mol_type = other DNA
aagggtcagttgtgcagttg

SEQ ID NO: 2573 - DNA, 20 bp, synthetic construct
  source 1..20: mol_type = other DNA
ttagtctaaggcagtcaggg

SEQ ID NO: 2574 - DNA, 20 bp, synthetic construct
  source 1..20: mol_type = other DNA
taggtatattagtctaaggc

SEQ ID NO: 2575 - DNA, 20 bp, synthetic construct
  source 1..20: mol_type = other DNA
cgagctcaagaactgtgact

SEQ ID NO: 2576 - DNA, 20 bp, synthetic construct
  source 1..20: mol_type = other DNA
tctgtgtaccgagctcaaga

SEQ ID NO: 2577 - DNA, 20 bp, synthetic construct
  source 1..20: mol_type = other DNA
acatcagctgttagcagtct

SEQ ID NO: 2578 - DNA, 20 bp, synthetic construct
  source 1..20: mol_type = other DNA
gaggacactctcgctgagga

SEQ ID NO: 2579 - DNA, 20 bp, synthetic construct
  source 1..20: mol_type = other DNA
tgggccgcctctgttattgt

SEQ ID NO: 2580 - DNA, 20 bp, synthetic construct
  source 1..20: mol_type = other DNA
tagaaattgggccgcctctg

SEQ ID NO: 2581 - DNA, 20 bp, synthetic construct
  source 1..20: mol_type = other DNA
cctagcttccacctaagagc

SEQ ID NO: 2582 - DNA, 20 bp, synthetic construct
  source 1..20: mol_type = other DNA
gaactctgtaggttgacagg

SEQ ID NO: 2583 - DNA, 20 bp, synthetic construct
  source 1..20: mol_type = other DNA
cctgtgagggtgcttagtga

SEQ ID NO: 2584 - DNA, 20 bp, synthetic construct
  source 1..20: mol_type = other DNA
acctttggagctttgactgg

SEQ ID NO: 2585 - DNA, 20 bp, synthetic construct
  source 1..20: mol_type = other DNA
attcgatacctgcttttgtg

SEQ ID NO: 2586 - DNA, 20 bp, synthetic construct
  source 1..20: mol_type = other DNA
aggatagccattcgatacct

SEQ ID NO: 2587 - DNA, 20 bp, synthetic construct
  source 1..20: mol_type = other DNA
aagtgaactacttggagacc

SEQ ID NO: 2588 - DNA, 20 bp, synthetic construct
  source 1..20: mol_type = other DNA
tgtatggcttatgcatgcta

SEQ ID NO: 2589 - DNA, 20 bp, synthetic construct
  source 1..20: mol_type = other DNA
tattaactacataggcactc

SEQ ID NO: 2590 - DNA, 20 bp, synthetic construct
  source 1..20: mol_type = other DNA
cagggtagaagactagcata

SEQ ID NO: 2591 - DNA, 20 bp, synthetic construct
  source 1..20: mol_type = other DNA
ttagcacttctataactggg

SEQ ID NO: 2592 - DNA, 20 bp, synthetic construct
  source 1..20: mol_type = other DNA
atagattgggctttagaggt

SEQ ID NO: 2593 - DNA, 20 bp, synthetic construct
  source 1..20: mol_type = other DNA
agacttattgaggatggtgt

SEQ ID NO: 2594 - DNA, 20 bp, synthetic construct
  source 1..20: mol_type = other DNA
taggacaagtcttatagaga

SEQ ID NO: 2595 - DNA, 20 bp, synthetic construct
  source 1..20: mol_type = other DNA
atgtgcatacccagggtagg

SEQ ID NO: 2596 - DNA, 20 bp, synthetic construct
  source 1..20: mol_type = other DNA
tctatgctgggccccaattc

SEQ ID NO: 2597 - DNA, 20 bp, synthetic construct
  source 1..20: mol_type = other DNA
aggttgtggaggttgttcct

SEQ ID NO: 2598 - DNA, 20 bp, synthetic construct
  source 1..20: mol_type = other DNA
acctgcagttatttagccat

SEQ ID NO: 2599 - DNA, 20 bp, synthetic construct
  source 1..20: mol_type = other DNA
aacctccaagtgcttcaagc

SEQ ID NO: 2600 - DNA, 20 bp, synthetic construct
  source 1..20: mol_type = other DNA
cttatttgtcctattggagg

SEQ ID NO: 2601 - DNA, 20 bp, synthetic construct
  source 1..20: mol_type = other DNA
tcgatccaaacaagcaccct

SEQ ID NO: 2602 - DNA, 20 bp, synthetic construct
  source 1..20: mol_type = other DNA
tcatcgatccaaacaagcac

SEQ ID NO: 2603 - DNA, 20 bp, synthetic construct
  source 1..20: mol_type = other DNA
cgcacatctggacctcagat

SEQ ID NO: 2604 - DNA, 20 bp, synthetic construct
  source 1..20: mol_type = other DNA
gccgcacatctggacctcag

SEQ ID NO: 2605 - DNA, 20 bp, synthetic construct
  source 1..20: mol_type = other DNA
agggccgcacatctggacct

SEQ ID NO: 2606 - DNA, 20 bp, synthetic construct
  source 1..20: mol_type = other DNA
ggagggccgcacatctggac

SEQ ID NO: 2607 - DNA, 20 bp, synthetic construct
  source 1..20: mol_type = other DNA
ttggagggccgcacatctgg

SEQ ID NO: 2608 - DNA, 20 bp, synthetic construct
  source 1..20: mol_type = other DNA
tattggagggccgcacatct

SEQ ID NO: 2609 - DNA, 20 bp, synthetic construct
  source 1..20: mol_type = other DNA
cctattggagggccgcacat

SEQ ID NO: 2610 - DNA, 20 bp, synthetic construct
  source 1..20: mol_type = other DNA
tgtcctattggagggccgca

SEQ ID NO: 2611 - DNA, 20 bp, synthetic construct
  source 1..20: mol_type = other DNA
tttgtcctattggagggccg

SEQ ID NO: 2612 - DNA, 20 bp, synthetic construct
  source 1..20: mol_type = other DNA
tactatgttgtcactgaggg

SEQ ID NO: 2613 - DNA, 20 bp, synthetic construct
  source 1..20: mol_type = other DNA
ggtactatgttgtcactgag

SEQ ID NO: 2614 - DNA, 20 bp, synthetic construct
  source 1..20: mol_type = other DNA
tgccctcttcgaagagatag

SEQ ID NO: 2615 - DNA, 20 bp, synthetic construct
  source 1..20: mol_type = other DNA
ggtcactaggcacactaaag

SEQ ID NO: 2616 - DNA, 20 bp, synthetic construct
  source 1..20: mol_type = other DNA
tgggtcactaggcacactaa

SEQ ID NO: 2617 - DNA, 20 bp, synthetic construct
  source 1..20: mol_type = other DNA
caagtcttgggtcactaggc

SEQ ID NO: 2618 - DNA, 20 bp, synthetic construct
  source 1..20: mol_type = other DNA
aagcaagtcttgggtcacta

SEQ ID NO: 2619 - DNA, 20 bp, synthetic construct
  source 1..20: mol_type = other DNA
cttagctactcacccctgtt

SEQ ID NO: 2620 - DNA, 20 bp, synthetic construct
  source 1..20: mol_type = other DNA
gataatggcttagctactca

SEQ ID NO: 2621 - DNA, 20 bp, synthetic construct
  source 1..20: mol_type = other DNA
cgacctaaagacctagcaaa

SEQ ID NO: 2622 - DNA, 20 bp, synthetic construct
  source 1..20: mol_type = other DNA
aaacgacctaaagacctagc

SEQ ID NO: 2623 - DNA, 20 bp, synthetic construct
  source 1..20: mol_type = other DNA
gtacaaaacgacctaaagac

SEQ ID NO: 2624 - DNA, 20 bp, synthetic construct
  source 1..20: mol_type = other DNA
attatgaaccatggagtctc

SEQ ID NO: 2625 - DNA, 20 bp, synthetic construct
  source 1..20: mol_type = other DNA
tcgcaataagattccattgc

SEQ ID NO: 2626 - DNA, 20 bp, synthetic construct
  source 1..20: mol_type = other DNA
gtgcaaaacaagtttcgcaa

SEQ ID NO: 2627 - DNA, 20 bp, synthetic construct
  source 1..20: mol_type = other DNA
ccagtaggacttactaaatc

SEQ ID NO: 2628 - DNA, 20 bp, synthetic construct
  source 1..20: mol_type = other DNA
tgccagtaggacttactaaa

SEQ ID NO: 2629 - DNA, 20 bp, synthetic construct
  source 1..20: mol_type = other DNA
agtgccagtaggacttacta

SEQ ID NO: 2630 - DNA, 20 bp, synthetic construct
  source 1..20: mol_type = other DNA
gaggattgcatcacatgtgt

SEQ ID NO: 2631 - DNA, 20 bp, synthetic construct
  source 1..20: mol_type = other DNA
tagcgcattgagcaaaattc

SEQ ID NO: 2632 - DNA, 20 bp, synthetic construct
  source 1..20: mol_type = other DNA
tgtagcgcattgagcaaaat

SEQ ID NO: 2633 - DNA, 20 bp, synthetic construct
  source 1..20: mol_type = other DNA
actgtagcgcattgagcaaa

SEQ ID NO: 2634 - DNA, 20 bp, synthetic construct
  source 1..20: mol_type = other DNA
ataactgtagcgcattgagc

SEQ ID NO: 2635 - DNA, 20 bp, synthetic construct
  source 1..20: mol_type = other DNA
cgataactgtagcgcattga

SEQ ID NO: 2636 - DNA, 20 bp, synthetic construct
  source 1..20: mol_type = other DNA
ccacgataactgtagcgcat

SEQ ID NO: 2637 - DNA, 20 bp, synthetic construct
  source 1..20: mol_type = other DNA
agaccacgataactgtagcg

SEQ ID NO: 2638 - DNA, 20 bp, synthetic construct
  source 1..20: mol_type = other DNA
ttagaccacgataactgtag

SEQ ID NO: 2639 - DNA, 20 bp, synthetic construct
  source 1..20: mol_type = other DNA
atttagaccacgataactgt

SEQ ID NO: 2640 - DNA, 20 bp, synthetic construct
  source 1..20: mol_type = other DNA
tatatttagaccacgataac

SEQ ID NO: 2641 - DNA, 20 bp, synthetic construct
  source 1..20: mol_type = other DNA
ctgtatatttagaccacgat

SEQ ID NO: 2642 - DNA, 20 bp, synthetic construct
  source 1..20: mol_type = other DNA
aggacccttaagtcataaag

SEQ ID NO: 2643 - DNA, 20 bp, synthetic construct
  source 1..20: mol_type = other DNA
attgcaaggacccttaagtc

SEQ ID NO: 2644 - DNA, 20 bp, synthetic construct
  source 1..20: mol_type = other DNA
tatcccaattgcaaggaccc

SEQ ID NO: 2645 - DNA, 20 bp, synthetic construct
  source 1..20: mol_type = other DNA
acgaagccaaaggtacttga

SEQ ID NO: 2646 - DNA, 20 bp, synthetic construct
  source 1..20: mol_type = other DNA
gccctgactgtcattcatat

SEQ ID NO: 2647 - DNA, 20 bp, synthetic construct
  source 1..20: mol_type = other DNA
acggccctgactgtcattca

SEQ ID NO: 2648 - DNA, 20 bp, synthetic construct
  source 1..20: mol_type = other DNA
gaacggccctgactgtcatt

SEQ ID NO: 2649 - DNA, 20 bp, synthetic construct
  source 1..20: mol_type = other DNA
aaggaacggccctgactgtc

SEQ ID NO: 2650 - DNA, 20 bp, synthetic construct
  source 1..20: mol_type = other DNA
tgaaggaacggccctgactg

SEQ ID NO: 2651 - DNA, 20 bp, synthetic construct
  source 1..20: mol_type = other DNA
cctgaaggaacggccctgac

SEQ ID NO: 2652 - DNA, 20 bp, synthetic construct
  source 1..20: mol_type = other DNA
tggcctgaaggaacggccct

SEQ ID NO: 2653 - DNA, 20 bp, synthetic construct
  source 1..20: mol_type = other DNA
atgtggcctgaaggaacggc

SEQ ID NO: 2654 - DNA, 20 bp, synthetic construct
  source 1..20: mol_type = other DNA
ataatcatgtggcctgaagg

SEQ ID NO: 2655 - DNA, 20 bp, synthetic construct
  source 1..20: mol_type = other DNA
cgataatcatgtggcctgaa

SEQ ID NO: 2656 - DNA, 20 bp, synthetic construct
  source 1..20: mol_type = other DNA
taacgataatcatgtggcct

SEQ ID NO: 2657 - DNA, 20 bp, synthetic construct
  source 1..20: mol_type = other DNA
cataacgataatcatgtggc

SEQ ID NO: 2658 - DNA, 20 bp, synthetic construct
  source 1..20: mol_type = other DNA
ggcaagtatgctagtcactc

SEQ ID NO: 2659 - DNA, 20 bp, synthetic construct
  source 1..20: mol_type = other DNA
ctggcaagtatgctagtcac

SEQ ID NO: 2660 - DNA, 20 bp, synthetic construct
  source 1..20: mol_type = other DNA
atcctggcaagtatgctagt

SEQ ID NO: 2661 - DNA, 20 bp, synthetic construct
  source 1..20: mol_type = other DNA
agatcctggcaagtatgcta

SEQ ID NO: 2662 - DNA, 20 bp, synthetic construct
  source 1..20: mol_type = other DNA
gtagatcctggcaagtatgc

SEQ ID NO: 2663 - DNA, 20 bp, synthetic construct
  source 1..20: mol_type = other DNA
ctcttgtagatcctggcaag

SEQ ID NO: 2664 - DNA, 20 bp, synthetic construct
  source 1..20: mol_type = other DNA
caacattatatcgatgcaat

SEQ ID NO: 2665 - DNA, 20 bp, synthetic construct
  source 1..20: mol_type = other DNA
tgtcaacattatatcgatgc

SEQ ID NO: 2666 - DNA, 20 bp, synthetic construct
  source 1..20: mol_type = other DNA
acttgtcaacattatatcga

SEQ ID NO: 2667 - DNA, 20 bp, synthetic construct
  source 1..20: mol_type = other DNA
caagtttcgcaataagattc

SEQ ID NO: 2668 - DNA, 20 bp, synthetic construct
  source 1..20: mol_type = other DNA
ttagattaaaatctggccgg

SEQ ID NO: 2669 - DNA, 20 bp, synthetic construct
  source 1..20: mol_type = other DNA
tcactaggcacactaaagtg

SEQ ID NO: 2670 - DNA, 20 bp, synthetic construct
  source 1..20: mol_type = other DNA
agatgtacaaaacgacctaa

SEQ ID NO: 2671 - DNA, 20 bp, synthetic construct
  source 1..20: mol_type = other DNA
taaggattcaatagtgtagg

SEQ ID NO: 2672 - DNA, 20 bp, synthetic construct
  source 1..20: mol_type = other DNA
ggcacacctggatttcacta

SEQ ID NO: 2673 - DNA, 20 bp, synthetic construct
  source 1..20: mol_type = other DNA
gagcaagggtcttagtgcca

SEQ ID NO: 2674 - DNA, 20 bp, synthetic construct
  source 1..20: mol_type = other DNA
ttgcatcacatgtgtcagtc

SEQ ID NO: 2675 - DNA, 20 bp, synthetic construct
  source 1..20: mol_type = other DNA
tttatcccaattgcaaggac

SEQ ID NO: 2676 - DNA, 20 bp, synthetic construct
  source 1..20: mol_type = other DNA
aataatattactgccaaatg

SEQ ID NO: 2677 - DNA, 20 bp, synthetic construct
  source 1..20: mol_type = other DNA
tgaatcaattttcaatattt

SEQ ID NO: 2678 - DNA, 20 bp, synthetic construct
  source 1..20: mol_type = other DNA
ttataaacttcagcagagtc

SEQ ID NO: 2679 - DNA, 20 bp, synthetic construct
  source 1..20: mol_type = other DNA
gagttgttatttgcattaag

SEQ ID NO: 2680 - DNA, 20 bp, synthetic construct
  source 1..20: mol_type = other DNA
attagcacttctataactgg

SEQ ID NO: 2681 - DNA, 20 bp, synthetic construct
  source 1..20: mol_type = other DNA
tcttggtaaggcagctcctg

SEQ ID NO: 2682 - DNA, 20 bp, synthetic construct
  source 1..20: mol_type = other DNA
tactcatcatgatcttggta

SEQ ID NO: 2683 - DNA, 20 bp, synthetic construct
  source 1..20: mol_type = other DNA
tagactagttgaaatcggaa

SEQ ID NO: 2684 - DNA, 20 bp, synthetic construct
  source 1..20: mol_type = other DNA
aattctaaaagtcctctctt

SEQ ID NO: 2685 - DNA, 20 bp, synthetic construct
  source 1..20: mol_type = other DNA
tgtgagataattcaggaggt

SEQ ID NO: 2686 - DNA, 20 bp, synthetic construct
  source 1..20: mol_type = other DNA
attcactttataaacactga

SEQ ID NO: 2687 - DNA, 20 bp, synthetic construct
  source 1..20: mol_type = other DNA
cccacaatttggtcccattg

SEQ ID NO: 2688 - DNA, 20 bp, synthetic construct
  source 1..20: mol_type = other DNA
gaatagggctctgcttattt

SEQ ID NO: 2689 - DNA, 20 bp, synthetic construct
  source 1..20: mol_type = other DNA
ttttatggccctcccatcag

SEQ ID NO: 2690 - DNA, 20 bp, synthetic construct
  source 1..20: mol_type = other DNA
catgaatttaattctttaaa

SEQ ID NO: 2691 - DNA, 20 bp, synthetic construct
  source 1..20: mol_type = other DNA
cattgtggaattaaattaac

SEQ ID NO: 2692 - DNA, 20 bp, synthetic construct
  source 1..20: mol_type = other DNA
tttctaattcaatatcattg

SEQ ID NO: 2693 - DNA, 20 bp, synthetic construct
  source 1..20: mol_type = other DNA
tcctcttatttctaattcaa

SEQ ID NO: 2694 - DNA, 20 bp, synthetic construct
  source 1..20: mol_type = other DNA
caagagatattcctcttatt

SEQ ID NO: 2695 - DNA, 20 bp, synthetic construct
  source 1..20: mol_type = other DNA
caataaataggtcagaaatg

SEQ ID NO: 2696 - DNA, 20 bp, synthetic construct
  source 1..20: mol_type = other DNA
ctaagtttcttaaggtaaaa

SEQ ID NO: 2697 - DNA, 20 bp, synthetic construct
  source 1..20: mol_type = other DNA
cattttcaaatattggtatt

SEQ ID NO: 2698 - DNA, 20 bp, synthetic construct
  source 1..20: mol_type = other DNA
taatgatttgccctcctaca

SEQ ID NO: 2699 - DNA, 20 bp, synthetic construct
  source 1..20: mol_type = other DNA
ccttttaaataatttttcct

SEQ ID NO: 2700 - DNA, 20 bp, synthetic construct
  source 1..20: mol_type = other DNA
aaaatgttggcatacatttt

SEQ ID NO: 2701 - DNA, 20 bp, synthetic construct
  source 1..20: mol_type = other DNA
aaaaatgttggcatacattt

SEQ ID NO: 2702 - DNA, 20 bp, synthetic construct
  source 1..20: mol_type = other DNA
cctgggtattgctgtccaaa

SEQ ID NO: 2703 - DNA, 20 bp, synthetic construct
  source 1..20: mol_type = other DNA
tatgttcctaaggaataatg

SEQ ID NO: 2704 - DNA, 20 bp, synthetic construct
  source 1..20: mol_type = other DNA
ttctttgcatttatgttcct

SEQ ID NO: 2705 - DNA, 20 bp, synthetic construct
  source 1..20: mol_type = other DNA
tttctttgcatttatgttcc

SEQ ID NO: 2706 - DNA, 20 bp, synthetic construct
  source 1..20: mol_type = other DNA
ttactctgactttccagaag

SEQ ID NO: 2707 - DNA, 20 bp, synthetic construct
  source 1..20: mol_type = other DNA
ggagtagatttttggagttt

SEQ ID NO: 2708 - DNA, 20 bp, synthetic construct
  source 1..20: mol_type = other DNA
tcaactatttctatcaaggc

SEQ ID NO: 2709 - DNA, 20 bp, synthetic construct
  source 1..20: mol_type = other DNA
attaatttcaactatttcta

SEQ ID NO: 2710 - DNA, 20 bp, synthetic construct
  source 1..20: mol_type = other DNA
tcttactgattcagccattt

SEQ ID NO: 2711 - DNA, 20 bp, synthetic construct
  source 1..20: mol_type = other DNA
tctcagcactagggagaaaa

SEQ ID NO: 2712 - DNA, 20 bp, synthetic construct
  source 1..20: mol_type = other DNA
aatataaatcctatagattg

SEQ ID NO: 2713 - DNA, 20 bp, synthetic construct
  source 1..20: mol_type = other DNA
ctgagtcagtccaaatgaat

SEQ ID NO: 2714 - DNA, 20 bp, synthetic construct
  source 1..20: mol_type = other DNA
taccttgaaattgagatttc

SEQ ID NO: 2715 - DNA, 20 bp, synthetic construct
  source 1..20: mol_type = other DNA
tctttttgaccaataccttg

SEQ ID NO: 2716 - DNA, 20 bp, synthetic construct
  source 1..20: mol_type = other DNA
tcaacaattgccatggattc

SEQ ID NO: 2717 - DNA, 20 bp, synthetic construct
  source 1..20: mol_type = other DNA
caagacttcaggcagttgtg

SEQ ID NO: 2718 - DNA, 20 bp, synthetic construct
  source 1..20: mol_type = other DNA
taccaagacttcaggcagtt

SEQ ID NO: 2719 - DNA, 20 bp, synthetic construct
  source 1..20: mol_type = other DNA
gttaccaagacttcaggcag

SEQ ID NO: 2720 - DNA, 20 bp, synthetic construct
  source 1..20: mol_type = other DNA
actgttaccaagacttcagg

SEQ ID NO: 2721 - DNA, 20 bp, synthetic construct
  source 1..20: mol_type = other DNA
cccaactgttaccaagactt

SEQ ID NO: 2722 - DNA, 20 bp, synthetic construct
  source 1..20: mol_type = other DNA
tatcccaactgttaccaaga

SEQ ID NO: 2723 - DNA, 20 bp, synthetic construct
  source 1..20: mol_type = other DNA
tttatcccaactgttaccaa

SEQ ID NO: 2724 - DNA, 20 bp, synthetic construct
  source 1..20: mol_type = other DNA
ttgtttatcccaactgttac

SEQ ID NO: 2725 - DNA, 20 bp, synthetic construct
  source 1..20: mol_type = other DNA
tgatcagcttcttgtttatc

SEQ ID NO: 2726 - DNA, 20 bp, synthetic construct
  source 1..20: mol_type = other DNA
ccagagcataaaaggaaagc

SEQ ID NO: 2727 - DNA, 20 bp, synthetic construct
  source 1..20: mol_type = other DNA
tcacaactcttccttagctt

SEQ ID NO: 2728 - DNA, 20 bp, synthetic construct
  source 1..20: mol_type = other DNA
cagttaggttagtgcacaga

SEQ ID NO: 2729 - DNA, 20 bp, synthetic construct
  source 1..20: mol_type = other DNA
ctgctcagttaggttagtgc

SEQ ID NO: 2730 - DNA, 20 bp, synthetic construct
  source 1..20: mol_type = other DNA
atactgaagtctctgctcag

SEQ ID NO: 2731 - DNA, 20 bp, synthetic construct
  source 1..20: mol_type = other DNA
tgtgccatatttttctattt

SEQ ID NO: 2732 - DNA, 20 bp, synthetic construct
  source 1..20: mol_type = other DNA
agaggccctcttgtttcaat

SEQ ID NO: 2733 - DNA, 20 bp, synthetic construct
  source 1..20: mol_type = other DNA
aatagaggccctcttgtttc

SEQ ID NO: 2734 - DNA, 20 bp, synthetic construct
  source 1..20: mol_type = other DNA
cgaatagaggccctcttgtt

SEQ ID NO: 2735 - DNA, 20 bp, synthetic construct
  source 1..20: mol_type = other DNA
ctgcgaatagaggccctctt

SEQ ID NO: 2736 - DNA, 20 bp, synthetic construct
  source 1..20: mol_type = other DNA
aaatctgcgaatagaggccc

SEQ ID NO: 2737 - DNA, 20 bp, synthetic construct
  source 1..20: mol_type = other DNA
ctcaaatctgcgaatagagg

SEQ ID NO: 2738 - DNA, 20 bp, synthetic construct
  source 1..20: mol_type = other DNA
tgctcaaatctgcgaataga

SEQ ID NO: 2739 - DNA, 20 bp, synthetic construct
  source 1..20: mol_type = other DNA
gcctgctcaaatctgcgaat

SEQ ID NO: 2740 - DNA, 20 bp, synthetic construct
  source 1..20: mol_type = other DNA
agttgacatatcttcaagtt

SEQ ID NO: 2741 - DNA, 20 bp, synthetic construct
  source 1..20: mol_type = other DNA
taatctcagttgacatatct

SEQ ID NO: 2742 - DNA, 20 bp, synthetic construct
  source 1..20: mol_type = other DNA
gataatctcagttgacatat

SEQ ID NO: 2743 - DNA, 20 bp, synthetic construct
  source 1..20: mol_type = other DNA
tgagctatctgtacaaaatg

SEQ ID NO: 2744 - DNA, 20 bp, synthetic construct
  source 1..20: mol_type = other DNA
gtgagctatctgtacaaaat

SEQ ID NO: 2745 - DNA, 20 bp, synthetic construct
  source 1..20: mol_type = other DNA
tttttccatttttctcttag

SEQ ID NO: 2746 - DNA, 20 bp, synthetic construct
  source 1..20: mol_type = other DNA
gtttttccatttttctctta

SEQ ID NO: 2747 - DNA, 20 bp, synthetic construct
  source 1..20: mol_type = other DNA
tgtgtttttccatttttctc

SEQ ID NO: 2748 - DNA, 20 bp, synthetic construct
  source 1..20: mol_type = other DNA
gtgtgtttttccatttttct

SEQ ID NO: 2749 - DNA, 20 bp, synthetic construct
  source 1..20: mol_type = other DNA
tgtgtgtttttccatttttc

SEQ ID NO: 2750 - DNA, 20 bp, synthetic construct
  source 1..20: mol_type = other DNA
tcatctcgggtatataaatt

SEQ ID NO: 2751 - DNA, 20 bp, synthetic construct
  source 1..20: mol_type = other DNA
tcaccattttgaccttctta

SEQ ID NO: 2752 - DNA, 20 bp, synthetic construct
  source 1..20: mol_type = other DNA
ttcaccattttgaccttctt

SEQ ID NO: 2753 - DNA, 20 bp, synthetic construct
  source 1..20: mol_type = other DNA
cttcaccattttgaccttct

SEQ ID NO: 2754 - DNA, 20 bp, synthetic construct
  source 1..20: mol_type = other DNA
tgcttcaccattttgacctt

SEQ ID NO: 2755 - DNA, 20 bp, synthetic construct
  source 1..20: mol_type = other DNA
ctgcttcaccattttgacct

SEQ ID NO: 2756 - DNA, 20 bp, synthetic construct
  source 1..20: mol_type = other DNA
actgcttcaccattttgacc

SEQ ID NO: 2757 - DNA, 20 bp, synthetic construct
  source 1..20: mol_type = other DNA
tcagttaggttagtgcacag

SEQ ID NO: 2758 - DNA, 20 bp, synthetic construct
  source 1..20: mol_type = other DNA
ctcagttaggttagtgcaca

SEQ ID NO: 2759 - DNA, 20 bp, synthetic construct
  source 1..20: mol_type = other DNA
tgctcagttaggttagtgca

SEQ ID NO: 2760 - DNA, 20 bp, synthetic construct
  source 1..20: mol_type = other DNA
tctgctcagttaggttagtg

SEQ ID NO: 2761 - DNA, 20 bp, synthetic construct
  source 1..20: mol_type = other DNA
gagctatctgtacaaaatgg

SEQ ID NO: 2762 - DNA, 20 bp, synthetic construct
  source 1..20: mol_type = other DNA
tgtgcatacccagggtagga

SEQ ID NO: 2763 - DNA, 18 bp, synthetic construct
  source 1..18: mol_type = other DNA
catacccagggtaggatt

SEQ ID NO: 2764 - DNA, 18 bp, synthetic construct
  source 1..18: mol_type = other DNA
gcatacccagggtaggat

SEQ ID NO: 2765 - DNA, 18 bp, synthetic construct
  source 1..18: mol_type = other DNA
tgcatacccagggtagga

SEQ ID NO: 2766 - DNA, 18 bp, synthetic construct
  source 1..18: mol_type = other DNA
gtgcatacccagggtagg

SEQ ID NO: 2767 - DNA, 18 bp, synthetic construct
  source 1..18: mol_type = other DNA
tgtgcatacccagggtag

SEQ ID NO: 2768 - DNA, 18 bp, synthetic construct
  source 1..18: mol_type = other DNA
tcatctcgggtatataaa

SEQ ID NO: 2769 - DNA, 18 bp, synthetic construct
  source 1..18: mol_type = other DNA
gtcatctcgggtatataa

SEQ ID NO: 2770 - DNA, 18 bp, synthetic construct
  source 1..18: mol_type = other DNA
ggtcatctcgggtatata

SEQ ID NO: 2771 - DNA, 18 bp, synthetic construct
  source 1..18: mol_type = other DNA
tggtcatctcgggtatat

SEQ ID NO: 2772 - DNA, 18 bp, synthetic construct
  source 1..18: mol_type = other DNA
ttggtcatctcgggtata

SEQ ID NO: 2773 - DNA, 18 bp, synthetic construct
  source 1..18: mol_type = other DNA
tcaccattttgaccttct

SEQ ID NO: 2774 - DNA, 18 bp, synthetic construct
  source 1..18: mol_type = other DNA
ttcaccattttgaccttc

SEQ ID NO: 2775 - DNA, 18 bp, synthetic construct
  source 1..18: mol_type = other DNA
cttcaccattttgacctt

SEQ ID NO: 2776 - DNA, 18 bp, synthetic construct
  source 1..18: mol_type = other DNA
tgcttcaccattttgacc

SEQ ID NO: 2777 - DNA, 18 bp, synthetic construct
  source 1..18: mol_type = other DNA
cagttaggttagtgcaca

SEQ ID NO: 2778 - DNA, 18 bp, synthetic construct
  source 1..18: mol_type = other DNA
tcagttaggttagtgcac

SEQ ID NO: 2779 - DNA, 18 bp, synthetic construct
  source 1..18: mol_type = other DNA
ctcagttaggttagtgca

SEQ ID NO: 2780 - DNA, 18 bp, synthetic construct
  source 1..18: mol_type = other DNA
gctcagttaggttagtgc

SEQ ID NO: 2781 - DNA, 18 bp, synthetic construct
  source 1..18: mol_type = other DNA
tgctcagttaggttagtg

SEQ ID NO: 2782 - DNA, 18 bp, synthetic construct
  source 1..18: mol_type = other DNA
gagctatctgtacaaaat

SEQ ID NO: 2783 - DNA, 18 bp, synthetic construct
  source 1..18: mol_type = other DNA
tgagctatctgtacaaaa

SEQ ID NO: 2784 - DNA, 18 bp, synthetic construct
  source 1..18: mol_type = other DNA
gtgagctatctgtacaaa

SEQ ID NO: 2785 - DNA, 18 bp, synthetic construct
  source 1..18: mol_type = other DNA
cgtgagctatctgtacaa

SEQ ID NO: 2786 - DNA, 20 bp, synthetic construct
  source 1..20: mol_type = other DNA
tttcatcagttagtcaggtt

SEQ ID NO: 2787 - DNA, 20 bp, synthetic construct
  source 1..20: mol_type = other DNA
cctttctatttcagaccgaa

SEQ ID NO: 2788 - DNA, 20 bp, synthetic construct
  source 1..20: mol_type = other DNA
tgcctttctatttcagaccg

SEQ ID NO: 2789 - DNA, 20 bp, synthetic construct
  source 1..20: mol_type = other DNA
gtgcctttctatttcagacc

SEQ ID NO: 2790 - DNA, 20 bp, synthetic construct
  source 1..20: mol_type = other DNA
agtgcctttctatttcagac

SEQ ID NO: 2791 - DNA, 20 bp, synthetic construct
  source 1..20: mol_type = other DNA
agtatagatgcctctcctct

SEQ ID NO: 2792 - DNA, 20 bp, synthetic construct
  source 1..20: mol_type = other DNA
aagtatagatgcctctcctc

SEQ ID NO: 2793 - DNA, 20 bp, synthetic construct
  source 1..20: mol_type = other DNA
taagtatagatgcctctcct

SEQ ID NO: 2794 - DNA, 20 bp, synthetic construct
  source 1..20: mol_type = other DNA
attgacacctccaactgtaa

SEQ ID NO: 2795 - DNA, 20 bp, synthetic construct
  source 1..20: mol_type = other DNA
gtattgacacctccaactgt

SEQ ID NO: 2796 - DNA, 20 bp, synthetic construct
  source 1..20: mol_type = other DNA
tggtattgacacctccaact

SEQ ID NO: 2797 - DNA, 20 bp, synthetic construct
  source 1..20: mol_type = other DNA
ttggtattgacacctccaac

SEQ ID NO: 2798 - DNA, 20 bp, synthetic construct
  source 1..20: mol_type = other DNA
tttggtattgacacctccaa

SEQ ID NO: 2799 - DNA, 20 bp, synthetic construct
  source 1..20: mol_type = other DNA
gttttcgcccgttacctcaa

SEQ ID NO: 2800 - DNA, 20 bp, synthetic construct
  source 1..20: mol_type = other DNA
agttttcgcccgttacctca

SEQ ID NO: 2801 - DNA, 20 bp, synthetic construct
  source 1..20: mol_type = other DNA
cagttttcgcccgttacctc

SEQ ID NO: 2802 - DNA, 20 bp, synthetic construct
  source 1..20: mol_type = other DNA
ctccagttttcgcccgttac

SEQ ID NO: 2803 - DNA, 20 bp, synthetic construct
  source 1..20: mol_type = other DNA
acactttcatcagttagtca

SEQ ID NO: 2804 - DNA, 20 bp, synthetic construct
  source 1..20: mol_type = other DNA
tctccagttttcgcccgtta

SEQ ID NO: 2805 - DNA, 20 bp, synthetic construct
  source 1..20: mol_type = other DNA
gctataggtgtcacatattc

SEQ ID NO: 2806 - DNA, 20 bp, synthetic construct
  source 1..20: mol_type = other DNA
ttgtagctataggtgtcaca

SEQ ID NO: 2807 - DNA, 20 bp, synthetic construct
  source 1..20: mol_type = other DNA
tttgtagctataggtgtcac

SEQ ID NO: 2808 - DNA, 20 bp, synthetic construct
  source 1..20: mol_type = other DNA
gcaatggacttagtacacaa

SEQ ID NO: 2809 - DNA, 20 bp, synthetic construct
  source 1..20: mol_type = other DNA
ggcaatggacttagtacaca

SEQ ID NO: 2810 - DNA, 20 bp, synthetic construct
  source 1..20: mol_type = other DNA
ttaggcaatggacttagtac

SEQ ID NO: 2811 - DNA, 20 bp, synthetic construct
  source 1..20: mol_type = other DNA
cttaggcaatggacttagta

SEQ ID NO: 2812 - DNA, 20 bp, synthetic construct
  source 1..20: mol_type = other DNA
cagattcctaaatacgcaca

SEQ ID NO: 2813 - DNA, 20 bp, synthetic construct
  source 1..20: mol_type = other DNA
tcagattcctaaatacgcac

SEQ ID NO: 2814 - DNA, 20 bp, synthetic construct
  source 1..20: mol_type = other DNA
gtcagattcctaaatacgca

SEQ ID NO: 2815 - DNA, 20 bp, synthetic construct
  source 1..20: mol_type = other DNA
gtggtcagattcctaaatac

SEQ ID NO: 2816 - DNA, 20 bp, synthetic construct
  source 1..20: mol_type = other DNA
agtgtcatatgtagcaatta

SEQ ID NO: 2817 - DNA, 20 bp, synthetic construct
  source 1..20: mol_type = other DNA
ttagtgtcatatgtagcaat

SEQ ID NO: 2818 - DNA, 20 bp, synthetic construct
  source 1..20: mol_type = other DNA
tatgtagctcagctcaatgt

SEQ ID NO: 2819 - DNA, 20 bp, synthetic construct
  source 1..20: mol_type = other DNA
cttatgtagctcagctcaat

SEQ ID NO: 2820 - DNA, 20 bp, synthetic construct
  source 1..20: mol_type = other DNA
ctgcttatgtagctcagctc

SEQ ID NO: 2821 - DNA, 20 bp, synthetic construct
  source 1..20: mol_type = other DNA
aaaatccatttgtccagtct

SEQ ID NO: 2822 - DNA, 20 bp, synthetic construct
  source 1..20: mol_type = other DNA
tttgcttttcagtcaggtac

SEQ ID NO: 2823 - DNA, 20 bp, synthetic construct
  source 1..20: mol_type = other DNA
taaaatccatttgtccagtc

SEQ ID NO: 2824 - DNA, 20 bp, synthetic construct
  source 1..20: mol_type = other DNA
ctaaaatccatttgtccagt

SEQ ID NO: 2825 - DNA, 20 bp, synthetic construct
  source 1..20: mol_type = other DNA
gcattggcttcatatttctc

SEQ ID NO: 2826 - DNA, 20 bp, synthetic construct
  source 1..20: mol_type = other DNA
gagcattggcttcatatttc

SEQ ID NO: 2827 - DNA, 20 bp, synthetic construct
  source 1..20: mol_type = other DNA
cattattctctagtgcctat

SEQ ID NO: 2828 - DNA, 20 bp, synthetic construct
  source 1..20: mol_type = other DNA
tcattattctctagtgccta

SEQ ID NO: 2829 - DNA, 20 bp, synthetic construct
  source 1..20: mol_type = other DNA
gtcttcattattctctagtg

SEQ ID NO: 2830 - DNA, 20 bp, synthetic construct
  source 1..20: mol_type = other DNA
agtcttcattattctctagt

SEQ ID NO: 2831 - DNA, 20 bp, synthetic construct
  source 1..20: mol_type = other DNA
aacttcatcaatatttcccc

SEQ ID NO: 2832 - DNA, 20 bp, synthetic construct
  source 1..20: mol_type = other DNA
tgtgggcctctattaagatc

SEQ ID NO: 2833 - DNA, 20 bp, synthetic construct
  source 1..20: mol_type = other DNA
catgtgggcctctattaaga

SEQ ID NO: 2834 - DNA, 20 bp, synthetic construct
  source 1..20: mol_type = other DNA
tgcatgtgggcctctattaa

SEQ ID NO: 2835 - DNA, 20 bp, synthetic construct
  source 1..20: mol_type = other DNA
tttatactttacccaacttc

SEQ ID NO: 2836 - DNA, 20 bp, synthetic construct
  source 1..20: mol_type = other DNA
ctttatactttacccaactt

SEQ ID NO: 2837 - DNA, 20 bp, synthetic construct
  source 1..20: mol_type = other DNA
gctttatactttacccaact

SEQ ID NO: 2838 - DNA, 20 bp, synthetic construct
  source 1..20: mol_type = other DNA
caacttcatcaatatttccc

SEQ ID NO: 2839 - DNA, 20 bp, synthetic construct
  source 1..20: mol_type = other DNA
tggctttatactttacccaa

SEQ ID NO: 2840 - DNA, 20 bp, synthetic construct
  source 1..20: mol_type = other DNA
ttggctttatactttaccca

SEQ ID NO: 2841 - DNA, 20 bp, synthetic construct
  source 1..20: mol_type = other DNA
tttggctttatactttaccc

SEQ ID NO: 2842 - DNA, 20 bp, synthetic construct
  source 1..20: mol_type = other DNA
ctttagtatgtcgagaactc

SEQ ID NO: 2843 - DNA, 20 bp, synthetic construct
  source 1..20: mol_type = other DNA
ccaacttcatcaatatttcc

SEQ ID NO: 2844 - DNA, 20 bp, synthetic construct
  source 1..20: mol_type = other DNA
actcatcatgatcttggtaa

SEQ ID NO: 2845 - DNA, 20 bp, synthetic construct
  source 1..20: mol_type = other DNA
tcactgagtttttgtagttc

SEQ ID NO: 2846 - DNA, 20 bp, synthetic construct
  source 1..20: mol_type = other DNA
tctggaatcttgtagaggat

SEQ ID NO: 2847 - DNA, 20 bp, synthetic construct
  source 1..20: mol_type = other DNA
ttctggaatcttgtagagga

SEQ ID NO: 2848 - DNA, 20 bp, synthetic construct
  source 1..20: mol_type = other DNA
ttcatcagttagtcaggtta

SEQ ID NO: 2849 - DNA, 20 bp, synthetic construct
  source 1..20: mol_type = other DNA
attcagcacttaggtagttc

SEQ ID NO: 2850 - DNA, 20 bp, synthetic construct
  source 1..20: mol_type = other DNA
tcccattcagcacttaggta

SEQ ID NO: 2851 - DNA, 20 bp, synthetic construct
  source 1..20: mol_type = other DNA
ttcccattcagcacttaggt

SEQ ID NO: 2852 - DNA, 20 bp, synthetic construct
  source 1..20: mol_type = other DNA
gccaggtgtcttatatctat

SEQ ID NO: 2853 - DNA, 20 bp, synthetic construct
  source 1..20: mol_type = other DNA
aggtcaaccaatttgctatt

SEQ ID NO: 2854 - DNA, 20 bp, synthetic construct
  source 1..20: mol_type = other DNA
ttaggtcaaccaatttgcta

SEQ ID NO: 2855 - DNA, 20 bp, synthetic construct
  source 1..20: mol_type = other DNA
agccaggtgtcttatatcta

SEQ ID NO: 2856 - DNA, 20 bp, synthetic construct
  source 1..20: mol_type = other DNA
aacgcaatgtatcaggcaac

SEQ ID NO: 2857 - DNA, 20 bp, synthetic construct
  source 1..20: mol_type = other DNA
aaacgcaatgtatcaggcaa

SEQ ID NO: 2858 - DNA, 20 bp, synthetic construct
  source 1..20: mol_type = other DNA
gatcacattacccatccgtt

SEQ ID NO: 2859 - DNA, 20 bp, synthetic construct
  source 1..20: mol_type = other DNA
tgatcacattacccatccgt

SEQ ID NO: 2860 - DNA, 20 bp, synthetic construct
  source 1..20: mol_type = other DNA
ctgatcacattacccatccg

SEQ ID NO: 2861 - DNA, 20 bp, synthetic construct
  source 1..20: mol_type = other DNA
taggtcaaccaatttgctat

SEQ ID NO: 2862 - DNA, 20 bp, synthetic construct
  source 1..20: mol_type = other DNA
tgctgatcacattacccatc

SEQ ID NO: 2863 - DNA, 20 bp, synthetic construct
  source 1..20: mol_type = other DNA
ttgctgatcacattacccat

SEQ ID NO: 2864 - DNA, 18 bp, synthetic construct
  source 1..18: mol_type = other DNA
gccaggtgtcttatatct

SEQ ID NO: 2865 - DNA, 18 bp, synthetic construct
  source 1..18: mol_type = other DNA
cgcaatgtatcaggcaac

SEQ ID NO: 2866 - DNA, 18 bp, synthetic construct
  source 1..18: mol_type = other DNA
acgcaatgtatcaggcaa

SEQ ID NO: 2867 - DNA, 18 bp, synthetic construct
  source 1..18: mol_type = other DNA
gatcacattacccatccg

SEQ ID NO: 2868 - DNA, 18 bp, synthetic construct
  source 1..18: mol_type = other DNA
tgatcacattacccatcc

SEQ ID NO: 2869 - DNA, 18 bp, synthetic construct
  source 1..18: mol_type = other DNA
gctgatcacattacccat

SEQ ID NO: 2870 - DNA, 18 bp, synthetic construct
  source 1..18: mol_type = other DNA
agccaggtgtcttatatc

SEQ ID NO: 2871 - DNA, 18 bp, synthetic construct
  source 1..18: mol_type = other DNA
tcaaccaatttgctattc

SEQ ID NO: 2872 - DNA, 20 bp, synthetic construct
  source 1..20: mol_type = other DNA
ccattttgaccttcttagcc

SEQ ID NO: 2873 - DNA, 20 bp, synthetic construct
  source 1..20: mol_type = other DNA
accattttgaccttcttagc

SEQ ID NO: 2874 - DNA, 20 bp, synthetic construct
  source 1..20: mol_type = other DNA
tctcgggtatataaattaat

SEQ ID NO: 2875 - DNA, 20 bp, synthetic construct
  source 1..20: mol_type = other DNA
atctcgggtatataaattaa

SEQ ID NO: 2876 - DNA, 20 bp, synthetic construct
  source 1..20: mol_type = other DNA
aactgcttcaccattttgac

SEQ ID NO: 2877 - DNA, 20 bp, synthetic construct
  source 1..20: mol_type = other DNA
taactgcttcaccattttga

SEQ ID NO: 2878 - DNA, 20 bp, synthetic construct
  source 1..20: mol_type = other DNA
ttaactgcttcaccattttg

SEQ ID NO: 2879 - DNA, 20 bp, synthetic construct
  source 1..20: mol_type = other DNA
ttaggttagtgcacagataa

SEQ ID NO: 2880 - DNA, 20 bp, synthetic construct
  source 1..20: mol_type = other DNA
gttaggttagtgcacagata

SEQ ID NO: 2881 - DNA, 20 bp, synthetic construct
  source 1..20: mol_type = other DNA
gtctctgctcagttaggtta

SEQ ID NO: 2882 - DNA, 20 bp, synthetic construct
  source 1..20: mol_type = other DNA
ctatctgtacaaaatggaac

SEQ ID NO: 2883 - DNA, 20 bp, synthetic construct
  source 1..20: mol_type = other DNA
gctatctgtacaaaatggaa

SEQ ID NO: 2884 - DNA, 20 bp, synthetic construct
  source 1..20: mol_type = other DNA
agctatctgtacaaaatgga

SEQ ID NO: 2885 - DNA, 20 bp, synthetic construct
  source 1..20: mol_type = other DNA
aggtgtcttatatctatgat

SEQ ID NO: 2886 - DNA, 20 bp, synthetic construct
  source 1..20: mol_type = other DNA
gaaaccagccaggtgtctta

SEQ ID NO: 2887 - DNA, 20 bp, synthetic construct
  source 1..20: mol_type = other DNA
tcaaccaatttgctattcat

SEQ ID NO: 2888 - DNA, 20 bp, synthetic construct
  source 1..20: mol_type = other DNA
gtcaaccaatttgctattca

SEQ ID NO: 2889 - DNA, 20 bp, synthetic construct
  source 1..20: mol_type = other DNA
caggtgtcttatatctatga

SEQ ID NO: 2890 - DNA, 20 bp, synthetic construct
  source 1..20: mol_type = other DNA
tttaggtcaaccaatttgct

SEQ ID NO: 2891 - DNA, 20 bp, synthetic construct
  source 1..20: mol_type = other DNA
gtttaggtcaaccaatttgc

SEQ ID NO: 2892 - DNA, 20 bp, synthetic construct
  source 1..20: mol_type = other DNA
ggtttaggtcaaccaatttg

SEQ ID NO: 2893 - DNA, 20 bp, synthetic construct
  source 1..20: mol_type = other DNA
gtatcaggcaacagaatctc

SEQ ID NO: 2894 - DNA, 20 bp, synthetic construct
  source 1..20: mol_type = other DNA
tgtatcaggcaacagaatct

SEQ ID NO: 2895 - DNA, 20 bp, synthetic construct
  source 1..20: mol_type = other DNA
atgtatcaggcaacagaatc

SEQ ID NO: 2896 - DNA, 20 bp, synthetic construct
  source 1..20: mol_type = other DNA
ccaggtgtcttatatctatg

SEQ ID NO: 2897 - DNA, 20 bp, synthetic construct
  source 1..20: mol_type = other DNA
aaaacgcaatgtatcaggca

SEQ ID NO: 2898 - DNA, 20 bp, synthetic construct
  source 1..20: mol_type = other DNA
taaaacgcaatgtatcaggc

SEQ ID NO: 2899 - DNA, 20 bp, synthetic construct
  source 1..20: mol_type = other DNA
cacattacccatccgttctt

SEQ ID NO: 2900 - DNA, 20 bp, synthetic construct
  source 1..20: mol_type = other DNA
tcacattacccatccgttct

SEQ ID NO: 2901 - DNA, 20 bp, synthetic construct
  source 1..20: mol_type = other DNA
atcacattacccatccgttc

SEQ ID NO: 2902 - DNA, 20 bp, synthetic construct
  source 1..20: mol_type = other DNA
tcttgctgatcacattaccc

SEQ ID NO: 2903 - DNA, 20 bp, synthetic construct
  source 1..20: mol_type = other DNA
ttcttgctgatcacattacc

SEQ ID NO: 2904 - DNA, 20 bp, synthetic construct
  source 1..20: mol_type = other DNA
cagccaggtgtcttatatct

SEQ ID NO: 2905 - DNA, 20 bp, synthetic construct
  source 1..20: mol_type = other DNA
aaattatttatacaccatca

SEQ ID NO: 2906 - DNA, 18 bp, synthetic construct
  source 1..18: mol_type = other DNA
tttatcaatatcttctca

SEQ ID NO: 2907 - DNA, 19 bp, synthetic construct
  source 1..19: mol_type = other DNA
gcacattctttctatacct

SEQ ID NO: 2908 - DNA, 17 bp, synthetic construct
  source 1..17: mol_type = other DNA
ttatagccattctatct

SEQ ID NO: 2909 - DNA, 17 bp, synthetic construct
  source 1..17: mol_type = other DNA
ctcaaagatcattctca

SEQ ID NO: 2910 - DNA, 20 bp, synthetic construct
  source 1..20: mol_type = other DNA
ttacacttaattatacttcc

SEQ ID NO: 2911 - DNA, 18 bp, synthetic construct
  source 1..18: mol_type = other DNA
gtttccatctactattaa

SEQ ID NO: 2912 - DNA, 17 bp, synthetic construct
  source 1..17: mol_type = other DNA
ctgtatacaccatccca

SEQ ID NO: 2913 - DNA, 17 bp, synthetic construct
  source 1..17: mol_type = other DNA
agttctactatactttc

SEQ ID NO: 2914 - DNA, 20 bp, synthetic construct
  source 1..20: mol_type = other DNA
tatacctttctttaaccctt

SEQ ID NO: 2915 - DNA, 442080 bp, Homo sapiens
  source 1..442080: mol_type = genomic DNA
cacagcctgagagcctaagaatttggggaatatgcttccttcttctagatactggtttttaatgaaagacatagaagagtaattgtcatatagaagttatttgactctatcattgttgtctggcccatttctttagggattatttgggctaaattctaacttttctaagccattttatgaggcctttatttctaccatttttcactgtaggcattatggctcctccacctggtatgagaccacccatgggcccaccaattgggcttccccctgctcgagggacgccaataggcatgccgcctccgggaatgagaccccctccaccaggcattagaggtgagtgggagcataggggtttgatggttcagccaggcccctgaatatgtgtatcctctttttctcaatgtttctatttcctttccaggtccacctcccccaggaatgcgtccaccaagaccttagcatactgttgatccatctcagtcactttttcccctgcaatgcgtcttgtgaaattgtgtagagtgtttgtgagctttttgttccctcattctgcattaataatagctaataataaatgcatagagcaattaaactgtgaggtactgttgtatatatttttttgcctgttgattttgatgagatcttaagttactgtggatgagggtgatgcctattaagcagttgattcaaatcatattctctttaattcttaggataaaaaggttttctgctatctaactttcactttgtgcattgactggtgttggttaataatgttttcatgacccgggggtttaagtggttgtgctgcttcacacatggcctcctgcttctcatgttgctatgtcacattatctgaagggaagtggggatgggatgaaaggccttgtaaggccacctatatactgaaggaagttgtagtgaatcacagtccatgctcattacatatcaaggcatttgaaatagaagttactctttttcttgggatgttgacctcagttgatcaggttttacagtgtcctatgatcagaatagaggatgtgatactggaataatcattttctaccattgagtaagtatttatttataaattactaaatgagtggaagatcctgggtactgggaggcaggaggttgcatatttgagttgataagttgtactactgataataaagataactgacacactaaaacatacttggtacactgaaatacaaattacggttatgtccagtggtatcaccaagtgacaaactgggagctaaatagttcagaaatgccctagtctctaggtccagtttgaattggttatggaacaaagaagccatttataaaagggaagagatttttaggttttgcagctaaggtttatagtaggcagcgagggaatgattcatagtgattgtagcagttggtttaccaagcactaaagagattggtgttaactccataatactgatagactgattggaattacattttttctcttgaatttaccaggagtggttgtgaatgtcaccttttccatcttttaaattacatccttgcaggtggtaatcactcaaggaaaaggaattatcagagtaacaatagttcctgttactgacttgatatggtctctgccagaatagcttctcagattaatggccactctcaggtaaggaaaataaagaggcgaagccttagttgctttaggagatgatataatacaggtgtgacatcagtgttttcagaatttgtaaatgttaaaacaaacttcttgatttaccaaagccacaaccaaagtactttacctggatctttcaagacagagcttctcagttcagacaaattgactgatgataagacaaacacttttcctctacaaaccgtggggtagtatgtagagagacctgtgatttcttcccatactgctctggaactacttctaattatacttttttctttgtttgtttttgaaggggaagcatttctccttgcattggtttgctggtatggatggcccttagattttggcatgagtgattatgcagcctatttgaagaaaacctgttttcaggacctttttaattaaatatggcctgttacatgagttaaaggtaagttataagagctctagattctgcaagatgcttgcttcttgtagttattttgcttggtgataatacattttcttttgtctggagcttcctggactttttgagaatcctgattgtgatgatataataggagaaaacttgggatatagatagtataattgagtgtggtgaatcttttgttatggaatgctagtctaagcttctgtgtgtttccactagggacacacatcaacatatcagtcttaaaacattcttggtagttaatgcttgatgttacttaaaaatcatcctacattcttgcattaaactacatacacgtggctgggcgcggtggctcatgcctgtaatcccagcactttgggaggccgaggcaggcagatcccgaggtcagaagatcgagaccatcctggctaacacggtgaaacctcgtctctacaaaaaattcaaaaaattagccgggcgtggtggcaggcacctgtagtcccagctactcgggagcctgaggcaggagaatggtgtgaacctggtggagcttgcagtgagccgagatcgcgccactgcactccagcctgggcgacagagtaaaactctgtctcaaaaaaaaagaaaaaaaaaaaaaaaagaaaatacatacatgtctcatctaaaacatggttggtcaacaactttctgatttcctgatacacattttattaaccggctccttaaatatatccatgttgcatatcatgtttgacatgctttcattgtagcttatagaataatttcaaatagaattttgggataaaaattatgctaccttaaaataggttatgaagtatttgaggtattctctttttatatgataggtaaacttggcttggaattaaaaagattttgaaagttgcttagggagctccctgcttttgtgaactcattattccttaattatgatgtcaaatttcagaagtttgttattaacataccggtattttgctttttatagattcttgtaatagaatattacaagtagaaactgatttacatagataattatgtgaaatagtgctgcttgactaggattttcatgatctcatttcaaagattagcaaaaacaccctttacctggtatgtttacctctgatactaccttcactgatttcagcaggtagtcagttataatccatggattgaagttttgatttatttatttatttatttgagacagagtctcactctgttgcgcaagctggagtacagtggtgtgatcttggctcactttagcctctgccttccgggctgaagcgattctcctgcctcagcctcctgagtagctgggattacaggtgtgggccaccacacctggctaatttttgtatttttggtagagacagggtttcaccatgttggccaggttggtctcaaactcctgacctcaggtgatccgcccaactcagcctcccgaagtgctgggattacaggtgtgagccaccgcaccccgccatgggttgaagtttttaaatgcatgttttccggtagttaatacattgcttgattctgtcttataattgcatttcagttctcttcatcttgtccatacacataataatgcttagtatataataaagcaaggtatattttcatgggatttttgtagtgggagaatgacatctgagcctgaaataggatatttgtgttgtaactttttcagtgtcatacgataccattttttgaccacttagttgatgcctctgaaaggaagagagaatcagatcgctaaaatttgatgtgtcgtcagtgtggatcctactcagtagtgtcacaacgaggctgaaaatcatattaagtgcttttaggacagaaacgtaaactgctcaggtaaaataaccttataaagagaaataagcatatattgcagaggccttggctaggttcatgatgacacaggaccttgtctgaacataatgatttcaaaatttgagcttaaaaatgacactctgaaatccagtcagtgtgcctcactagacttttcgatttcaagattttctgcagaaaatgttttgaaaactttgaatacttaaaaatggcaggtgtagtattgcactttgctagttgctcagatacccttttttatttgtatagatattctgagttcctttttttttctacatgttgtacgttgtcgaaagctaaaaggaaacttatccttggatcacggaaggcagaggcatttggtgagatggaaacaaggatgtgtaaaaatgagacgaccacctctcggattaaaaaaaaaaagtgccagagttctagggttctaagtgatgtccaggaaggaggaggaataatatttatggagcatatattatggaacacagtgagtatagtacctgcctttaaatgaatactgttggttttttaggacagttgcttttttttcttttttcttcagctgtgtgcagttgattaacttgtacagagcctatcacacaatagatgtttaagaaatattaagtgaatgaatgaggcagcattgctaatttttgtatagtgagacagtatctcacagtccaggctggagttcagtggcattaacataactcactgcagccttgaacacctgagctcaaacgatcctttcaccttatcctccagagtagctgggactacagtcgcgtgtcaacatgcctggctaattttagttttctaatttttttagagttgggatctcactatgttgcttagactggtcttgaactcctggcctcatgccatcctcttgcctcagctggtattgtaggtgtgagccactgtgccaggtactaattttttttatgttagaaaacaagtttttaggtattttatagttacttccttatgacaatatctcatcagaatctaggcctatctgatatctgactccatacgtttataccgtgtagtcagccattcccagatagaggtcatttgagttacttagtgtttaccagcacttgtttactaccttgcgatgatatttacagtgtatttttgggtatggttttggggttatttggttgttgttaaaatgcctgtaatcccggcactttgggaggttgaggcgggtggatcacctgaggtcaggagttcgagcccagcctggccaacatggcgaaaccctacctctactaaaaatacaaaaattagcctggcgtggtggcaggcacctgtaatcccaactacgcaggaggctaaggcaggagaattgcttgaacccgggaggcggaggttgcagtgagccgagatcgcgccaatggcactccattcagcttgagtgacagaggtgagactcccatctcaaggtaaaaaaaaaaaatagaaatcagcaactgctatttgagtttacaggagtgagaagtcctctcttgcatggtgagatggggaacatttaattcaatagaaatatttgagaccaggtatggtggctcaagcctgtaatcccagcactttgggaggctgagttgggtggatcacctgacatcaggagtttgagactagcctggccaacatagcaataccctgtctcaaagatacaaaaattacccaagcttggtggtgtgtgtctgtaatcccagctactcaggaggctgaggcaggagaatcacttgaacctgggcggcaaaggttgcagtgagccgagaccatgccactgcactccagcctgggtgacagagtgagactccgtctggaaaaaaaaagaaaaaaatgagatataaagttcaaaggatgtatttattaagccaatataaagtaaagaggtggggaatgttgtagaagtatatgttgataaagggatcaggtggttgtacaataagaagggggttgcagacatggagaaacagttcttctagctcttccactttcagtatcatctgtgtgggtcactggaatcctttttcacaatgcctgcttgcccatgagttttaagaactagtacagtgtagaaatgattagtaggaaaaacttggctgggttaatttgctttgctgagccgattcaacttaaaaagcgaggtccatactaagtgcccaagaatcaagaaggaggctcacatttgaacttgatgtttagttaatgtgaatcattttctgttgaactaatgagaatacagtgaccttgagggttaggttgtacatctgaattgttcgggctgtttcctgtcttttggatgttttgtttgtatagatattttcattttatgttacatcatttgttctttggtagcaaaaattgagttgaaatgatacagttcctgaaatctatgatttcatgtttcggagatatgtatcaggaataatagtgtgggttctcatgagaaaatctggattgcattactgtgctactttggtttcttgtcagagaagttagtagtttagacctccttcagaatcctttctttggactttgtgtttcttacgttgtgccagccttgattttatttgtctgtcctctgtctttctataccatttgtttacacttaactctagaattttttgatgcatgttttcagtgtactctagtcctaaaattggtttacatttaattattggggagaatagcaagttgtcgatagtatctgtggtggcattagtgtatttctgtttcagttctttggacagtttgctagtggaaatagtcattgtatttagctctgtgagacccgactggcagattgctgtctctctctctctctctctctctctctgtgtgtgtgtgtgtgtgtgtgtgtgtgtgtgtgtgtgtatgcgcgcccgcgtttgtttccttcatgtagattgctgtgtgtgtctttttcttcataattccccttaattctgtgtgctttgaatgacactgttgttgttactgttgttttatatccattgtcacataaaactcttatcatttattcttccaggccagggactgtccttatgggtagagatacactatctgcaggaatttatttttttacgtatttttactagttgatgggaaagacattgggaaagacctgggctggatttgtgatgagctgtgtttactgagcatgatgaagtaaagctcaacgtgattactctgaagtccagccttactgtcagtctaaggactcaggatacaaatactcaaaacataaattcttagactctaaatttcacatggtttttcctatcagtacaggttaaggataatggcgtgttgtaggtttttccagtgcaatacaaggaagttggttctagatcctttagtacagttaatgttttgtagagtgtgttctatgttcactgcattggtatgtctcatctttggcatgatcttggctcaccgcaacctccgcctcttgcattcaagcacttcttgtctcagcctccagagtagctgggattacaagcatgtgccaacatgcccggctaatttttgtatgcttttgtggagacaggctttgccatgtttgccaggttggtctctaagtgatccacccgcctcagccccacaaagtgctgggattacatgcgtgagccaccgtacccagccacacctttgcttatttctactatgcatttcaagtgatcatttcaagagaataagtacttaggagctcctatgctctttttttttttaaccctgttgcttgcatcacccggttccaaccctatatgaaagtttcatgagcatgtttctgtcactgaggcagcttctccatttggcatataattgagaaattgctagtttgtggctgagacattggtttgagaggagacgtaatttatatatttagcagaatgcttaagttacatttccagagattaatttaattctacttttaattaagttaaccctttgctgtatctttacaagacgtaggtggagatttaattttgactcttagattcagttaaggtgatgaaattggcattatatagtttttgatgctgagccccacggagattaaaagatttgctaaacaccatgcaatttttgaatcacatctctaatctcacattattctgtactctattttttgcttgtatgattgatgggtctttcattatctgtgattgacattctatgagtaggtgcttttgctttgcctataagtcgttattatgaaggaggaatggtgaataagaaggtaatttagaaaagcctatattaaatataccatgaacattgaatatagcaagatcttattctctagttgttatcttagttgataaattctgtatgtgttatgtgtttgtgtatacatatgtacatattaatgatgtgggtgttgatactgtgatcacatgacaaatgactggtttatagtgaaaagctgttggggttcagagaaatgaacattcttctaaaagtgaggtagataagttattttatagttcttgcctttgagtctctgttcttctggtagaaatgttagtgtatttataacctctcagatttgtttggttctcttagtgttcttgatccaggcagttagcgatatgttggatgaattgagaaaaatgagtttttcctttcctactaactgaattagattagaaataagcagttaagtgagaaaaatagggaattagtgccagatatgttgaggtgtagtgttgacagggggtcttttaccttcagatgtttggtgcaacttagagaatgcagtggtagttgctggcccagcccatccaaacaacctcatttgtggggtgatacttcacagatgacttaaaataaatcccctgaaaataagaatctctggaagagatgacacgtgtatgtgcgtgtgtgcacgtgtgtgcgtgtgtgcacgtgtgtgtgtgtgtgtgttttggtggagtggtaggaggagggttggcttaatgatgagaatcattatttcttgaattggatgacactttccattcctgcaaagggagcgtgaggtccagccttgctaattcatgatcaaagtaatttgctgagagtagtggaaggaatgagttagcagaagatggcaaattgcattaatgagtagtaggaggaaaacaaataagcaaattttaatgtggttggaacatgttcctgagttgtatgaagggagacaggtaaattgagagtaatgttatgattgtttcatttgttggaaataaggaaaacttgcatggtttgaattgtggaacaataggtggtgtatgttaggagtcagaattatcatttaacatgtaagtttctgttttacttcagataaagaatgtcagctacctttcccatgttagcttctataccttttcttgaggtgaccataaataggtaatattgtctttcactgagattgttttaattagcgaagtgtgctgattaaatgtcttttcttgataaattattagaatgaataaaggatggtatttctagatagccttggttagtcagtgatttgtttaaatttagtgtggataagaatcacctgagggctttttaaacacagtttactgggtcctgaccttagtgtttctggcttattaggtataagtatgagaagttgatttttatcaagtttctagatgctacagatctaggaaccatacttagagtgctattatatgtcttttaatgtacactgatatggaaaaagcaatgatacatcatgttatcgcatattttaaaatgtgatcatgaccagggaatcttgaaagttgtcttatgtaataatgtaaatcaatgtagaataccatatatttttttcttgcaaggttattattaataggaatgactatttgtagccaatgtgttcaaatgcatgggaggacgtaaacacttcataatttcctggaaatacagacatatatcacttaaaataatacatttctaatataaatttaaattatctacgtgatatgaggaaacgagcttatttttgataattttcctagcagtgaatcaactatactcatttgaatctaaattaaattaaatttgagtaaattcagccatttctaaattcagtccatataaattcactttgggtaaaagaagacaaaattcctgaaaacagtagattaaaaaaataacattttaagagcaggtatgatctcaatgaatatagtgtggtaatttctgcctaatacctacccttttggaggaaggaaaggtaatcctgtttgtgtttaatgttaattactgaactctttataacttgttttatttatttattgtttgattttaagcatctgcttctggtggacttacatatgttgggtttgggaaatttcaacatacaggttggcattccagtggctatagttgtttcttgaaatttagtactgttttccaatgatgattctctttgggaataggctgttctcttttacttaaaaactgtaaaattagccacttcagttgagactcctccaggtttggaagtggtgaagaatatggatatattcagatcaaatcagtcattctctgtgatacagcaactgaacaagaaacccagacttcaaacaagcagacttctttgggttggactgaataaaatgagaagaaattacagaggatttgaaaatgtatatggcctaggaattattgaaattattttggagggtggcaacaaatttgggacattgtactttctgttttaatgtcaattgtataatgtgtaactctagtgagcatggctggataccgtggcttcacattttaggtagactgggtgttttatctactgagtgaattacagccttcggcaatgatgtcaaggtagcaacaaaacccaaaaaatccatcctttagaaattgttttaagtcacaatgatgataccttctttaaaagctttgacttactgaaataatgcttttcatttgtccaagatgagtacatagcagaatttggaaatatggttccaaaaggctaaatagactgacttttttgatatttttcccttatagggagaaagaaacattaacggtttatcagatgccttgactgtactttttactgctttgtcttcaaggcctagtgtaataattaacatctagtatgtgtttgatggatagccaatttttgcttcattggtatgttgttaccacagtcattggtagagtcaatatatgaatgaagaaagtataacaaatttgccctctagtagagtacaggcaaagtatggccgtcagtttcaccctgattttttttcctccattcttttttagggtttaggtcaagaacaagggcatttcattgtaccacatagctgagagtagggaattgggacatactgtcttgctttaaattaaagttgtctgtttcatcaagtagagaggttcctaagatattgccagatttctgactcggggtttgttaaaaatagaaaaggtagttccttaaggttgtattttattggatgcctccacctgcttcaggctagctcactggagaataaatattccaggttaaaaaaaaaaaagcatgtgttcacgtgaacttgtcctttgagcaaacctgttggaaatcaagaggtcattgctgttggagaggataagagggtgtacttgttggtgtgttaagagtagttcacaacataaaaataaatgtaaatgcatctattatatttgggttggcaaaatatattggttatttactctgttgattcctgtagtgtacataaatatgatctacaactctgtgaacaaaaaggcttgaaaaattgttctgaaaatggacaaatcatgaacagataattgaacaagaaaataagcagaaagtaaatttgtgaaatatttcaaactcatttacattcagaaacatctttttaagatcactgtgatacattcgactgtcaattctgaagagacgtataaaggaaatgccagctaaggagcaaggaaacagctttcattcatgggctaaattgcagcttaaaaaagatggaccaggattatttcctttagaaacttactgtacaaaagatactgttcaccccattagagaactgatttgaagttactcttccctgtgagggctctgtcatcttaactgtattcacatactttcaactgttccccttgctgctaacctcaggttctttagttcatctatctggcagagctgatttggggaaaacaagacaaaccttctcaggttttcttaataaataagcagttgtcatgtttcaagagttttagaaatgagcaataatcaaggaagaggacaacgattgcatacgtttataatatttagaacatcttttgccacaataaacactggaaaccacccacttgtggacaccaaacatttggatttgtatattttgtggcattccctcactctaatcctctcatccttaaaaattttcagaaatttttgcagcaacaaacactgattgcaacatatgatttagggtagatttatgaaccattttttcactgaaatacatcaacaggagtgagtagtctgagtgaccaccccagcatggagaaaactgtagtttacagattcttctggagcatttttatttctagattgcggtggaagtctaaccccccttggagatgtctgccttaaagggtctttggccagggtcctctgtagagccatagtccagatctactctatttgtgtgctccttacaacatcagaacagcaactctcaatccggattcatccccagaatgccgtctgagtcacagcgtggcaggtgcataaagaattatctactgaattgagaaacatttcaaatatataaaacttgaaatattttgggtagtctgtacaaactcaagttgacaagccaaccctgcaggaatatatggatagaaggggaaggataacatgttgaattcagctacatgcctcatcagctagaaaaccttggaagaaagaaagatagattgatacttgcctgaacttcatcaaccaataatattttttttcttgctatggagagtccactcgcctttggaagatttaccagtaaaagccctgcacatgatatacttgtgtgcacatgcaataaggacatcattccccaactcctgctagcattgtgaaagagctccaaatattcaaataatataaactttttttcgtggacatttagcttacgagtttgtttaaatatgtgggaaaattatgtttagataatagtattgaaatgagaatgtaagatacacattgaatgataaatgtgtatgaattgttcattgtgccttaggtaagccagacagtgaaattaaatgtgtaatagttgtatttttttgcataatcttggaatgtaattagttaaaagcaaacacttagattttgaacatgaatctgttaagcttgttaatgtagttgctgtggctaaataactggtttcctggggaagcttctatttgctagaattttattctggaacagttgttagaaaggaattctcaggtcaccttttaaagatatacacaattctgtattcactttttgagtgcataagggtaatagaaaatgacatgggaagcgttaattagaaaaaaaggcattttgtttatgtgcatttgaggatacagtgtttgaagtttctaaataattgttttatgacattttcttggtacatagatattgctaacaattagtttgctgaagtatgtagaaacattttaagaaatgattttagaaatataattgttaaagtacctctgatgtatattaaaaatccttttattttggtttatattgctatggatgtttttctgggggaacttaatgtatacaacttctaactaagaagttttattaatgctgctttatgtatgaaagtcatggatgtggatgttattttgtcagtggtctttctgttaaaatttacgtggtgtaagattttcttttcatgatggaattgccaaaaaggccagcctctagaacacttacatgttaagggttgggtgggatttgtattactttgtgtatataaccgacaggattgtgttactgaatcttaaccagcatagagatggctgacattttgcattttgggggacattaaattgttacacaatgatgtcattggttactgataggagtgtttagactcttagatggctttgttagtattaggcaaatattagatgtggatttaggagataagagggtggggtgttggagccctgtgtgcacatgagcatatgttgcagggcctccagacctaaatccacgtgaagatggtggtggtggtcttacctatatgttaacattacattgtaaacaggtagactactttccttttgctagtgggagtgttaaatcacctctcagaacattaattcattaaattgcccctaaacattaattgattgctggtggatatgctaaatatttttaacatctatttttctaaatgtatagatgtcatttttaattcataggggatagaaccagttttgcttgcaaaaagcaaactgttcactggatcattgggcttaatttttaggttgtggtagatataatagaaatgttcttacaatttgtagtataatactgtatatctctataaatatatatgtgactgtttttctgatagatgcaacatggtggaaatgtcatcataaatgtcggtctgcctttgtttatagttttcagatgtgtatatgcagttttttatacaacagaaaaattgccacatgagtcaaatagcataggttagaaaagttctcatttgccaaaaatatgtgactttcataatagtgagttgtttttgatttaaaatgtttctatctgtagaggcattttataagtttttatggggatactagcaatgggatgtgaaacctgagttcattagatcattgggtgataatggaacccttatgtgtatacaatatacatggttatatgttttttaaagcataggagctattatgtctgcatggttctaaatatatatacacacacgtaaacacatatctatatatctatctatatagatagatagataaatacatacatatgtagtgaaagcttttgtttcctccctcacataggcagattatttgtgtgtgtaaatgagcagctgaaggggaattttgttacatgtgtataagacagtcacaatatataattgttttgctttaattgtttagtctttgatttgtaggaattgccaacacgtatatttgtgtgtatgcaggtttatatataaatacatatcactgtataaacaacatttattgtcataggatagaaatattcttaagttgccagagatactgtatggctgctaaatgtatagtagaaaaatgttaccttttgctttttagcatctgcatacagattactaataggcgtatattgtgaccagtaaaccactagacaagggcataaacactttagtttgatcagtagaattgctatgccatgtttaaatgggatttatttggttgatgcagaatatataattgtatctagaagataaatattacaaaaatattttaatatacaatttctgtcatatttttggaaatatatttttattcaaaagtagaatcattgttgccaatagagttagcatctttgtgtgcttgtgaggtttgattttgagggttttcttggttttgttttgggttctggagttctaaaaaatgagattgtctttgtctaaacaatttttatataaaaatgtacatttttgtattattttttcttattccaacctaatcggtggcttgtcccttcctgtgtttattgggctgttgggtgcctggatagagctggagaccatttaactgctgtatgaataatagataagcgtcttgaataacatctgaatttcctaggtatgtagaaacacccaccatgcacatatatgaacatacagaatatatgaatgttaaaatatggtgaaaacaatcttttgctaatagaagtgttaacctttatttttaaaaaaaatttggtgtgtatgtagaggtttatttgattgttagttgtgtccatgtataatatgtcatctacctttacagatgtgcagaaatttgttgtatttggtggatatattttacttaaaactatagggcagaagctttttatgtttgttgaagtgaaatggcataccaaacctgtgtggtagagtgggatttttagattgctgtgtgtacagtcaggttatatctttaaaatacctattcgttatatattaatatgtagacattgctgatacatatgtatgtaaaaatcagagtatttttattaatataggcattagcttcttgattcacttgtttgttgggaagcacttggagaaggatgttgaatactttgtcatttcatctctgtgacgtacagttgtcatgtcaaccctcctatctgcgggttttgcatctgcaagcacatgcagctggaaagtacagcattggcagaatctgaaacccgagtaaagagcacctcattttcataaccatgggttctgaagagctaagggagttgaggatgcaccgattttggtatgggggtacggtacaggtacaaatccccgatggatatcactagacaactgtacaatcctctttagctttttttttgttttatagacagtgtggacgtgcatatattgcaagcatcactttgttaaactatgcttaaccctgcaaatgattttaagagctctgtgtgggtggctttcttgggtttactattaaatatctgtgtttatcatagttgttctataacatttcaactttgtaaatatgtagtttgttgataaagaggatagagacatttttcttttgttgatagattgttctttcccctttgcttagtcttcattgtgttgctgggattgtaaaagacaaattacttgcacatatttaagcttatatattaaatgtatatatgctgtcatgttagagagggagagtggttccctcccccacattttgatttaaaagtaaaaattaatttttattaaattgtttgggtcagtttcatgtaagaataatctctacattgaatggtatatcttggccgggtgcggaggctcacgcctgtaatcccagcactttgggaggccgaaggggccagatcacgaggtcaggagttcgaaaccagcctggccaatatggtgaaaccccgtctctactaaaaatacaaaaactagccggccgtggtagtgcacatctgtaatcccagctactcggcagtctgaggcagaagaatagcttgaacccaggaggcagaagttgcagtgagccaagatcgcgccactgcactccagcctgggcgacagagtgagactccctctcaaaaaaaaaaaggtatatcttattttctttgatgtactgaggttcatgatgcaattcattcttaagcatatactatagaatctttaaattatatggttctgtgttcatttgtggcatgacagtaaccaagacaatttagtaaataatcagcaaatgaaatatttaattttgaacatctagtatttctagatgtatagagagtctcacgaagtagattttttaagtatcttgttgtaaatttgttagtactgttgtcttttgcaattaatgtggcaatgaaattgattattgatacacaggctcttggagctaaacaaaatttatcgtgttttaatttggatattagaaggaggaaatgaaaagagactctctacattttacctgttattatatagcttaccattatatcagatatgaattgctttttttaaaaaacttagattaaatgtcatgtaaatgcatttagtctttccagatacacttcttgatatcataatttttatttcctgttaatattcaagatataaatgacttcattaaagagattttctactacctctaggaactatacaatattctgtatgtgttcccttggttgcatgacaatattcaagacaactttgtaaataatagataaaaaattttaatttttaacatctagtctttctagatgtatagagtctcacaaagtataattttgtaaataagtcattgtaaaatttcatggtttcattgtgttttgcaaatgtcttggcaaagaacttgataaaattttgggcttcttgacctatacatattttggtatctctttattgggttgtttagtgtaaggaaaaagttgaaagaatgtattttcaactttgaattgtaatcagaaagaaaatatattttaaccattgtttagtgcttctgttatatattgaaaacttcagtcttaattttttagttacattgttgatagggcattatataaatatacttctatagtcattgtaggaaatgtcttttataaggaaatatttcttctacctctgaattacacagttttgtatttacttggactgcatggcaacattcaaaaaacactttgaataacagataaaaatgacattttctaaagctctaggtttgctagatgcatgaagtctcagcaaagtataaatttgtaaatatttcattgtaaaatatcataaattgactccttcaagtgttcagtagtacaataggtaatcaataattggcctcttgggactgactgtaacgttttggtgtttgtatgttttgagacagagcaatagattgcctccatatcttttaaacattcaggtctcttgtataagaaaaataaccattgtggggtttttgtgcatcttatactaatatgaaacaaacaaaaccccctggatattttatccttagaaagatagaggaagacaggagaagggaatggtcattgtaaattagatagatatattgagtgttagaagattatttaaataattgttcttttgttatttgtactctttgcaaatttatttaaatgcatattcatgtatatcataagtatatattcacatgcatgtctaaatttagtggcatagatctatctcaggggtattaatctttcattcgtgtactgatttgtgttttattttcatttaaaaaattgtggaaccagtggctgggcatggtggctcatgcctgtaatcccagcactttgggaggctgaggcgggtggatcacctgagggtcaggagttcgagaccagcctggccaacatggtgaacccccccgtctctactaaaactacaaaaattagctgggcatggtggtagatgcctgtaatcccagctactcgggaggctgagacaggagaattgcttgaaccctggaggtggaggttgcagtgagccgagattgcaccattgcactccaccctaggcaacaagagcaaaactctgtataaaaaaaaaaattaaaaaaattgtggaactagtgttttatttctaagcttgcagatatttctagaattccacttactgttacatctaaatgtatgctgatttttcgttaaataataagcaggtctgtaaacattttcttttctaacctctttccatatttatatgagtatagaaaaactgtggttatgaatattttttactttttgataacttttaaaaactatcagatatgtgataatcagatagatttcaagtttacttacggtgtaaattaggaaaatttttataaagattctatccagtattgatcaaaagtataaattgtgtgtctttttaagcagcagtttggcaatgacaatcaaattgatactatgtaaaagttttgaaatgttatagctggctactggggtttttatctattccagttctcgaaaatttaccaaatataggttggctgtaaaatcataactatctgaggtatctgtcaataaatcaaagattgcaatgatgatagcttctttaacatgaatgtaattctaacagtaaaaaatttctatatggaatatgttttgtagtcctaaattgatattttatatcatttttcagtgaacaagtagttgtttacaggtgtctgtgcatatgtctcaagtttttctaactaaaatattaatagttaagtctaaaaatatgaattatacgtggggcttgtcattctgacatttaatacttcagcgtggtgataatggtgatataatatactgtttgaaattgtaacacatgagttaaaatcaaaagattgataagtacatatttgtatattgctacatgacaaaaatctaggaagaatatgattcacatgaaaattctttggaaggacatgacagacttttaacagtcctgtatagtgaaaggagaatagaacgactacttctactttctgtatctgaaattttcaaaagctatttcaaaatgaacatttaaacaacaggaaattttagagacaaccactttgtgcctgtcttcatccttgacattcaacatcctaggaacaatgggctgttgtattcaacttcttattcccaacagccattatgaatggtttttgattgatctcacaaagagcatgtgctttagacattaatgcagcgactaccatgaaacagagtattggattacctaaggaaagaagcagaggatggaatttgaggtaggtgtcaaacagtgaaatttcgtttgagaaacagatgagtgaaagaaaatagtaactgaaacattcattctataaggagagtacattttaatactggcgatgctgtatttgtgggtactgactagatcaagatgttagaggaggtgtctcttgggataagttggaagttatccttcattaatttggtataaactgaaaacagattgcttctttccttttaaagtggttgagtctctgatgggtttaaagtaggcctttggggatttatagatcattcaaaattagcaggggaaattttaaatattctctgcatctttctaaaaggtgtggtttaaagttggtgagaaagtgaaatggttgctggttgaacttgattttctctattcactatgcctggctagcctaaaattatcctaatgggtatgttcaggtgcctgatttgtatctaaatgtttctgtattggatactgtttttcttaggcaatcaggatgagtgaaaaattgatttgcagctgacctgcaaatggaatcatcaggaacatccctttctcatggagtcccttaatttacaagttaactgcaaacataggtaagaaggttctggtgctatttgggggtgaggtattggtgaggttttgcctaagctcaggaaaataatactggtacaggtgtatttcttggccaccttggaattatcaaatgagttagtctttaaaatatattttatcgaagtgaaggtatagtttggttcccagaccaaactgagggtcgggctgctatttctcgtgccccaataatgagatgcagatgaacaggggaggaagagttagagctagttacaggaagaaggcctggaaattgtcaccacaccaactcaaaattacaaagtttttcagaacttatataccttctaagctatatgtgtacatgtaagtgtgtatctaaagacataagtgatctataactaaggtctgagtcttcgagaccttcctttggagcctcagtaaatttacattaatttaaatgggtctgggtgctgaggtgattaccattatcttgtttcctactaaatcatggaggtttggggagttcctttagaacccccaataaacttgtttgtggaggcctggagagtttcttcagacccctaataaaacttgtttaatcgtgctttaaggttcaagagaggcctaggtaaaacttggtgggcttttgtgacattccaacctttgtataacaaaatggctctttcagcttttagtatttaacttaaccactccgtcaatactgaaacagttgttatggaggcctccattagagggacctggcctgccacaggtgcgcgcgcacacacagatgagagtacctttaattagtttacttatctatggtcaaacacgacaatataactaataaaagaaatgaccaggcatctaattactagaaattataaaattgacaatatgtgtgttttcataaatgtacagttttcacaaaatgttttcacatacagttctttgataaagggtgaagttcatggaaaccacagaaagatgctgatactgtaaactattaaagtcattactgaggttgtaagttgactttgctataggattgataatgggaagtgtttctaaatgttaacataacctgtaataaagttcaacatgagcattcacttaacctgccgccttagctgtttcattagagtggtatatatctcaccttacagtgtttcttctttttccttgtcaggagatgatagttccaagaaggaacattttatcgtctttgtttttaatctcaagaatggtacctaccatcagtgaatgacctgttgcagtgctttcattgaagtgttcttcgttccctcagcaatatgattgtaagggcagttgagtgctaacttgactgggagaggggcggtttggttagacaggacttgatatattctgtttttcataagcttgatgtttttttctggcagctacttgacattcagatctgattggttacatattgctatgtaataaattatcctgaaacaggggcataaacaatattgttatgtccatggattctgttggtctgaccatgcccaggacagtttaggaattgtatcctctccaaagtttcattgtagcttctgtgtttttagtatagttactatttctttctcatcaaatagactgaactccttttgttattatcatttaaatatttaggcattgttgtcatgtatattgtgcataaatgcatgtatactgcaggtaataattctgtatgtgaacaagtgacctagaggtaaaggaatccaaatacagagacgtgtggataatgtgggagaggtcagtttttcacaagacataggaaagaggctgggcgcggtggctcctgcctgtaatcccagcacgaggccgaggtgggtgtgtcggtcacttgaggtcaagagttcaagaacagcctgaccaacatggtgaaaccccgtctctactaagaatacaaaattagctgggtgtggtagtgtaatcccagctacttgggaggctgaggcaggagaatcgcttgaacccgggaggtgaagattgcagtgagccaagatcacaccattgcactccagcctgggcaacaagagtgaaactccatctcaagaaaaacaaacaacaacaacaacaaaaaagaaggaaagagctaacatctgacctcctttattattagaatactccaaaaggaattttgatccacatgctctttcttcataatagaatgaatgttgcatgtcattttacagacaaattttattagttcttgctgatgatataaactttgcttctaaccttttcccattttcccaactgtgtctctcaggtgatgactgaaaaagggaaactgtgccactatttgtaccatcattttcaccaaaatctaaaaatgctttttatgacgtatggagacattcttcatgtttgtttcagtggacactccttgcagatgtaaaaaactgagaaaactcacttttggaaagtgacctaaagagtgtcattgaagtgaattttaagtaggcacgatgattgttttcatggttgctgttggatcatatctcaggagctggaatgacagacattattgaacaaagaaatcaggatagtggaacttaaagggcttcatctcagtgctttcataagtatgaagtgcatatatttataattttcactaatcacagggtaaatataaaattgattcattaaaaatgtttcataagaattcaaaggacatagaattttgtgaaatgtagtatttttacttaagtgccttttctctgcttctaccccacagccaattttttataaaccagttgataacataagtagtttttgggggatgatacattacttatacattttctatgtagtaaacatgtatgtgtatgtgtgtgggtgtgtgtctaattactttgttggacagattcctgtggtttggaactgctggggccaagtttatacaaaaatctacatttttgagtaaactccccatgactctagtaagtttccacagtatttgagtattctttatttcctaaagctgtacaaacatcagataatcaatatttgtaaggatcgataatataatttataatgaaattgctttatcagctattaatgttaactacatcatcttcatatagccttataactcatttgtgctattccattttcctctgttccttttattttcacttcccttgtaatgttagtctctttgtactgatttctgaagagttcatttatgattaaacatgttaacattttgtctagaattgcaaatatgttttttctcattcattttactatggtgttttattttttggttatacagaagttgtatattgaaatataatcttgttctgttttatgactttggagttttgtggttttttaaaacatgtttacattggtatcatttatttgtattgccttctatttcagcagttagtttgtcatttctttttccattaatcatcattctggtgttaatgaatgcattaaatatttaaagtactcactttgacccgtgtagttatctgttaagttctaccataaagaaaatttccaggtaaaattggctacatttctgttaacttgccttaccattttattgacactttaataattactaatgatttatactgtcttatctattccattgagttctatctcatttctcttctttttcagaatattccctctgtatacttgcatttttttctatcaattgacgcttacaattatttttgcaagttggaaaaaaatgcagtattaatttcatttgcaacaaatttaatagattaattaggagagaatagatatctttaaaattgagtcttctgtccaactgcaaggtaggtctttctatttttaatggaataataatttggggatattgctagtgcagttttttaaagtattttttaatactaggcattttttagttatttgttaatttagtgatttggattagtcattcaacttgtctaattggtatgtgaaaactttttgtatgtcttttctagtaatctttactgaatttctaaaattatgactttcttgaacaatctgtcattttaattaccttgattaaagtacatttgtaagtacttctaggatatatggaagtagaaagtatacttggcaattggactgttaattgcaatccccttaggtcatggttgtttttgttcttattggtattttagtaatcttttagaagaaagatgttttaccaaatttggtgacaggtttaataaaatttctttttgtatagttgaaaaacttgtccttataattattaaggttaaaattaacatattccaaaattgaacattattccatcccatgaatgaagtaaattatattttagtatatactccttaattatagttgttataatttcatttggaatttctgaaatgattcctaaacaaacagctttatacttgttctgttatcagaggtttttaatgttttactggctctttgaaaccattttgagtatttctgacacagactagaaacaagtaatatttttctttaattattttgaaatgttggcttaaaaaggtgttgaaataatagcgtgtttttttttttaaagttatttatcttttgtccaaaatcaactaagcatttatgcaagcatgtgttttttggaacccttttttctgtttccttgttctttgtgtttttctttatgccaatatcacactgttttgataattgtagctttgtagttaacattttgaaattgagaactgtgactcttccacctttgttctttttcaggtttattttgctcatttcagtcctttgaaactctgtatgagttttaggattttttttttaatttttgcaaaaaatgtcatgggaagtttactagggattgagtctgcacattgcatgagtattattgacataaacaatactaactcttccagtccatgaacatgggatgtctttttatttatgtcatttatttctttcagaaatggtttgtaaatttcattgtacaaaaaattttctttgatcttactggttaagttactttctaagtattgtatttttaaaatgctattgcaagtggaattgttctttgaacttcttttgtgaattgttcattgctatttttgcatgctgaatttgtagcctggtattttgtggaatttatcagttctgagatttttttttatgctcccaaggaaaattttagcccgtaataatttttttggagacatagtctcactgttgcccaggctggagtgcaatggcactatctcccaggtttgaacaattctcctgcctcagcctcctgagtaggtgggattacacgtgtctgccaccacgcctggctaatttttgtgtttttagtagagatggggtttcatcgtgttggccaggctggtctcgaactcctgagctcaagtgatcctcctcccttggcctccaaaagtgctgcaattacaggtgtgagtcactgtgcccgaccagcctataaaattttagtggatgccaagagagatacttctacttcttttctgacttgggtgtcatttctttctttttgttacttgattgctgtggcaaggatttgtaatactgtgttgaaaagaagtggcgaaagcaggcatccttgcttttgtaactgatactagaggaaatccttttagtgtttaacctttgagaataatgtttgttttgagtttttcatttatagcttttactatggtgatgtgatttcatctattcctaatttgatgaatgttgaattttttattccttagtctttgtcttgctttggtaagagggtaatgctggccccataaaatgtgttggggagtgtttcctccttgaatttcttagaaaagtttgaaaacacttgttatttgttatataagtatttatttgatggaagattttttttttttttttttttgagactgagtcacgctctgtcgccccaggctggagtgcagtggcgcgatctctgctcactgcaagctccacctcccgggttcacgccattctcctgcctcagcctcccaagtagctgggactacaggtgcccgccaccacacccggctaattttgtgtatattaagtagagatggggtttcaccatgttaggcaggatggtctcgatctcctgaccttgtgattcgcccgcctcagcctcccagagtgctgggtttacaggtgtgagccactgcgcctgaccggaagatttttcattaataattcagtactgttaatagtttcatgcgtgtggttttgttttggtggcctttagtttcctaggtttgtaggaatttgtacatttcatctagattatctaattttttaacattcacttgcttatagtactcttacaatctcttagttctgtagactttatgtttctgatggtagcaatttgagtctgccctctttttttctagtccacttagctgaagctttgtcagttttcttgatttttgtttatgaagaaccaagtggttattttgtgttcattttctgttttattcatctctatatcattctttatgtccttccttttcctctttgtgtttactttgcttgtgtaattctttaatttgtacagttggttgatttgaaattttttttcatgttacattaataggtgtaagattcataagaaaacatgttttattttcattttcattcattcccacatattttctaattttccttataacctcttggtgtactagttgtttgtgttttctcatgtccacaaatgtgtgacttttccaaggctttccttctgttactgatttctaaattcattgtcttgctgtggtcagagaagaggcttctttttctgtctgttttttcaaaatttattgagactgaatttgtgaattaactacatttgttgtgaaaaatatctcatgcacttgaaggggagtgtgcattttgttgttcagagattgttgtgtgcatatctgttagatataattgatttattgtgatattacacacttctattttctctttttttgtggggtgaggggtgagacagagtctggctctatcccccaggctggagtgcagtggtgtgatctcggctcactgcaacctctgcctcccagattcaggcgagtctcctgcctcagcctcccaagtggctgggattacaggtgcctgccaccacacctggttaatttttgtatttttggtagagacagggttttgccatgttggccagggtggtctcaaactcctgaccttgtgatccacctgcctcggcctcccaaagtgctgggattacaggcgtgagccaccacacctggcccacacctctattttcttgttttctggttattctacccatcattgagagtaggttcttgaagtctatatttcttagtgaggaaatgtctatttctcccttcttttatgtcaatttttgtttcatatattttgatggtttactaggatcataaatgttggtcatctttatcttgtaatttttattaatgtataatgtacatttttgtttgttgtaacattttggattaaaagtctgttttgtctgacttaagcagtctacaaaataactgcttctgtaacaccttctctcctacccctttcagttgatgctacaaaattatatgtttaacattgtgtatcaaaatatatatatatatttgagatggagtcttgctctgtcacccaggctggagtgcagtggcgtgatctgggctcactgcaagatccgcctccagggttcatgccattctccttccttagcctcccgagtagctgggactacaggtgctcgccaccacgcctggctaatttttttgtatttttagtagagacggggtttcaccatgttagccaggatgatcttgatctcctgaccttgtgatccgcccgcctcggcctcccaaagtgctgggattacaggcttgagccaccacacccggcccaaaatatattttgtaaaatttattttttgttaaattttttagaagataacttgtagagttataatcaaagttacaataatatttactggttttttgcctaatgtgtggttttataattgatcaattcaagtcatgtagaatctaaaaaaggcaacaggctgggcatagtagctcatgcctgtaatacccagcactttgggaggctaaggaaggaggattgcttgagaccaggagtttgagaccagcctgtgcaacatagcaagaggctgtctctacaaaacaaattttaacaacaaaaaatagctgggtatggtggcatattcctgtagtcccagatactcaggaagctgagatgcaagggtctcttgatccctgaaggttgaggctacggtgagccatgatgatgccactgcattttagcctgtgcaacagaatcagagcctgtttcataatgaaaaacaagtggagggacagtacaccattattaacctctcataattgctcaattatttacctttaaccacatctttatttctttatagggcttccatttactatttatttcaaccttcaggagtcttttcagtgtttctgtttggtgggggagcagatctaatgtaaacaaactcctgttgtttgtacatctgggaacgtatcaatttctcccttactttttaattaacagttttgttggatattagattcttagttgagtatttttttttttttagcacattgaatgtgtcagtccactaccttctggccttatgagaaattgactgataatccctgttacatgatatcgtttttctattgttgctttcagaattctttctcttttgctcttcatagttgaaagatattgtgtctcattgtgggtctttgagttcatcttgcttggagtttgttgaggttcttagatgttagaattcatgtctttcatcaaatttgagaagtttccatctagaatttcttcagatattctttctattgcatgctttctcttttctgggaatcctgcatcgtttgtattggttagcttgggtggtggaccagaagctgtttagactcttacctttcttcaatattttttctttttgttcctcagaattgataaaattctgaagtttgctgatcttttttgttgcctgctgagataatgcatttgaatccctgtagaaaatttttcatttcagttaattgaatgtttcatgttccagaatttcatttggggttcctttttgaaagtttttttatttttgattattgatccttccattttgctcatgcatcattttcttaaccttctctatcacttcctttagttctttgagcaactttaagacagttgttttaaaagctgcttacctgtcttaccatctttgagatcagaagtggtaaactgatgagagcacagcctctcaatgtttgtataacagagtggtgtgttttgttttttgtttatgcctaccatcactccttctgcaagctgtatgtaagttgtccaagaaatgtgtacagctaccttgcgtgagggtgtaggagttagggataggtaatttgtactttgctaagagttgatgttgagtgaaattaacctcaataaatctgaatttagggttaatacaatcctccagagttccaaaccagttatatcataccgattattctggtgtatttatcatctcagggggagaaagagttctgttgcgtcctgctctgccatactcccagaatcctcagctcaccagttttttagtttgtttgttttgtttttgtatggatacagtttctcattctgtctcccaggctgtagtgcagtggcactatcatagctcactgcagcctcgacttgttgggcccaagggaccctcttgcctcagccttctgagtagctgggactatggacatgcccgaataatgtttcttttttaaagagatggggtcttactacattgcatagcctcatctcggagttctgcactcaagcattcccccagtctcagcctcacaacgtcctgggattctaggcgtgagtcactgtgcccagcttgttttacagtagtgaaatgaatctgcccatttatactttctgattatcaatgaaagttgtgttctataattttgttgcttttcagttgtgatagtttatgcatcacataaaatttgccatattaaccagatttaattgtactactcattagcattaaatgcactcacagtgttgtgtaactaacaccatattcaaaacttttgtcatcttaattggaaactctatacctgttactctaatccctagtcccttgtctccccaatcatgttttctgcatttgattttgcctattgtaggtatttcttacaagttgaatcacatagcatgtgttttttggttcctggcctattttacctaatgctttcaagtttcatgtaatacatgagaacttcatttcttattatgaccgagtaaatccattttgtgtatgtatacatgtgtgtatacatgagtgtgtgtgtatacacatataacacaatttttatccatctgctaatggatagaattttaaatctattcctctgctaatggacattttatatgccagtgctcaccaaaacattcacagtgtccattaagagatgaatacatttaaaaatatgtccattaatatttgagtgagcattggcatacaaatatctgagttcatgtcttcgtatctgattatgtatataggggaatgaaattgctgagttatgtggtaatttaatgaactcactttttgaggaaatatttgttatttattatgagaaattgaagtcaccaaaaatgagaactgaataatgaaccttctcatatctagcaactagagttaataactatgaacattttgccatattttgaaaattacagttaccatggtgatttaatcctgaataggtttatatttttatgtatcaatttttaaaataatcacaatatcctatctctacctagtaaaatttactaaaatcccttatgtgtcttctaaacacacaaagaaaaaacaattctcatttaaatttctcaaggttgtgcatggtgtctcaagcctgcaatcatagcatttttggaggccaaggcattttgcttgagcccaggagttccagatgagcgtaggcaaatagtgaaacctgttttcacaggaaaaaaaaaaaatgaggtatggtggcatgcacttgtgaacccaattatttcagaagctgaagcaggaggatcacttaagcagtaggctacaatcacaacactgaactccaggctgggtaacagagtgaaacattggctcaaaaatataaaaaattctcagttgtgcgaatgatacaacagttttttgagcaaatctggatccaagtgagtaattcacttttatctaggctatttttatgttagtcttgactgtattaatttatattcaatcttaaatctctcttaattaaggtatgaaagtcaacccttttttggttctatatttaagtaatttttaaaaaaatcttgaattaaaaacattatttagaagtaactttcatattctactggatttcttatttgctggtttttttggggggattgattctaccctttatttttagtattctgaatgagttttggtgagctactgtggtccaaaatatatattgtgtatacacaatacatagtctgaattcttgtataacaaaagtacagtccatatttgtaaggggtgcttggaaaggtatattaggtatattaccttacatgtgtagatcttcataagtaatagttggcaaggtctgctataaacttgttacatatttctatatttgtcattatattagagacatttttagtctttgatgttatttttcccattaatatggtgtcctgacctggtcatgctttcagtttttcatgagatcatgctaatgaaatttcttaaaagttttgcaaatataatctgataacgtactttgattttttgaaaaaaagtcatctcttacccagtaaatatcaactaattgctggttttcttttgtgatttcttctcaatgtattttatattaaggtttggagataccagtccttttaagcctaatcctcatgctatctggtaaaaattattaacaactaaaaattacttaatgtatattacaaaggaggtagtaccatctatgaaatctttttgataaatcttactccactctgtcttatgtatgtttaaatgagcaccagaagaattatgcattacatttcatttgattggttaatctttgagctcttggtttttaatatttgtttcttgctgttttctctttgaggaaatgagttatttgcgatataaaactttcacatttctacattgtgcccatagtaggatgccacccctgtggtcatgtttaatagttttttctcagtgtttcggtgtttaatattttctatcatttttttaaaaaaatattcaacattgagacatttttctcaatgtattatattctcaagatctgattttttgtctgactagttttatcaaatcattaattcagccatttattatatgaacaccttttgtaaaacagaagaacactaatttatcatgatattttcatatatattttgtgatattgagaatcattaagtattttatcacctgctttttacaaaaacacaatagtctctcatttcactaatagttatacatttgctctaagtatcagtaaatttactctgaatgataagttcttcatttaaataggaacttaatcaacttttttgggatttcagttcaaaaggaaaggtaaataaatgttttttcccttatcttaccatttatataataatgaattgatgtgcaagtaatcttcaaaggtgactagtttttaaattcatgttctttattcagaagacagaaagcattttcaggagatttgaatatttgaagttatattttaaaggtgataatgctaatagcataattaaaaaacagtttctgcatgtaaacacatggtagaatataacaggtaatatatatttgtaattatttttctatttcatgtttattcaaatgtatgtacaatctctgtagcttgtagtttggctgtgttatgctttataaaatttatttatctgagacagggtctcactctgtcgcccaggctggagtgcagaggcatgatgtcagctcacagcctccacctcccaggttcaagtgattctcctgcctcagcctcccaagtagctgggactacaggcgtgcaccaccacatctgactaatgtctatgtatatattttttagtagggtcaggttttcaccatgttggccaggctggtcttgaactactgagctcaagtgattaacctgccttggcctctcatactactggaattataggcatgagcctccacacccggacataacatttattttttattttatattttatattttatattttattttatttttgagatggagttttgctcttgttgcacaggctggagtgcaatggcacgatctcgcatcaccacaacctccagctcccggttgcaagcgattctcctgcccagcctcccaagcagctgggattacagataagtgccaccacgcccggctaatttttttatttttagtagagtcagagtttcgtatgttggtcaggctagtctcaaactcctgacctcaggtgatttgcccgcctcagcctcccaaagtgttaggattacaggcatgagctaccacgcccggcccataaaatttatttttatcccagttgtgtgtacttatttacttatgtatttatttatatttatttatttgagatggagtctgactctcttccccagactggaatgcagtggcacaatcttggctcactgtagcctctgacaccagggttcaagccatcatcccacctcagcctcccaagtagctgggattttaagcatgtaccaccatgcccagctaatttttatattcttagtagagacagggtttcaccatgttggccaggctggtcttgaactcctgacctcaggtgatccacctgcctcggcttcccaaagtgctagaattagagaggtgtgagcctccataaggaatatgatttgaagggaagaggggatatgagtgtgaggtaaatgttttcctatttaaatattgaaatataaaaggctattcagtttccattcaagtaacatttggaagctttttatttcataatactattttgtgtagaaaccattactgtttgttttgtatttgtgtaggtaaaaagtattatgaaattatgtaattacagtattcactctgccaaaaaaaacaaaaataattataactcgggtatctaatgattgaacatttagtaattcttccctgacaaaaagagaaaaatattataactcaggtatctaatgattgaacatttagtaattcttccctgattataaaagtagcacatttatactttggaaaataaaacagcatgtatgggaaaaagtaataaacatagagaaattccatcacctcccttcccctctcctccaagaaaaagtggcttacgcctgtaatccaagttcttagggagccagaggcaggaggatagcttgagcccaggagtttgggacttgcctgggcaatatagcgagaccctgtttccccaccccacccccccaaaaaaagaaaaacgtaattccatattttacaggtttagtgttgacttcataaaagatggaagggaaggttatcagagtatcccattgtagtgattatagtgctcagattctagctccatacctgttagaacacattcgcaattgtcagcttaaactatatttgtatgtattgtttgtctgttttgtattaaaggcaaaagctcattatcaattagttgtatgttttaaagagttggccacaacatccatcataagacctatctaaagaggaatacatgatgtcttagtacaaaggagtagagatacaatgaatgtatttattttcatgtttcttaagagggaatgcactagcaattgacggtaaaatagatacaaatcaagtaaagaaaccagtatatttttagtcattatgtcgctttgaacaacaatttgtttaatcattttgcggtaactggttgcttggaactgccttattttttgtattcaatatatttatttatgggagtgtatacatattccagggtgttctagttcctcagggaaaatctggatgacatagaagaattttgttctttattatgagtcaatttataatttcatctttttttaaaaggcatttttcctacagctagacgttttgattgtcacttttgttgtgagaaaaaaattacaaagacgttgtaaagattgggaatgaggaaggtgacttgatcgggtatcacagacttacaaaatcttgtatgtaattagagttatgttaatggcacatttataagcaaagtaatgtcatggaatggaagacccataagttgacatgagaaacagaaagtgtattaaagttaatctgcattcatgggggcagattgttagccaaatgaataaagaattagattcatcttcatggtatgtagcatgaagaatttaaaatgaatcagaggtttaaattaactgcagaaattatagagtttcagaaaacgaatttctctccaattttgaggaaattactgatgatacacattgtagaagcaacaagaaacacaaagattgatagtaaaaatgaaattacagagttgaaaaagttgtgacatcacataagaagagtgaaacccttggtgtgtaagatataatcggggaaaaataccagttcaaaggaaaagtgacttgagcacatagttcactgaaaaaaatacacaaagtgctgttaatcatataaaaggattcttgggtttgctcataataaggataatgacaattgaaaatacaactaagatataattagtttctctactattagactagcaaaagtccagaagtttgacaacatttttttttttttggcaacatgttcggaattatggaaaatcatacgttgcttctgggcatgtaaaatgtaaaccatatgggtaggaatttaatattttgtaaatttatatctgtggcaaatacatagttcatctcctagtaatatgtagcagtaagaaggattgatggatgtttgtataccactatgtgataatgtcttggatataatgtagaaataggggagaagtcggctacaggaagtaaaaatggcaatatggtgctcagggtgcattcatcactataacagataaccattttgttaatggtgccctgcgcggtaactgaaattgtactgggctttcaacagaattttgtcaaaatgggacgctgcatgagctaataagttgtgaaataaatagggttttattgtggagtaataagtaacacaaagaagggggtttgcagtatcttaggaagaagaacagacgttcttggtaaagttcctttaatatgaaaatagcatttttaaatacttggagtagtgagtgaagaagctttctctatgagagcacggttagttcccaaataaatcccagcctcctctcttctgttaatttcttcggaaggatttgaggtagcttttgaagtatttggtcaaagttgcaaactcctcgggaggaggccaggcatggtacctcacgcctgtaatcccagcattttgggaggctgaggcgggaggatcacctgaggtcaggaggtcaagaccagcctggtcaacatggcgaaaccctgtctctattaaaaatataaaaatgagctgagtatggtgatgcacgcctgtaatcctagctacttgggaggcttgaggcaggagaatcacttgaacccagaaggcagaggttgccgtgagatgagattgtgccactgcactccagcctgtgtgacaaaacaagactcctcctggaaaaaaaaaaaaaaaaaaaaggaaacctgagattctgcttaacaattgtaaagtcagaaggtatgaagagtatttgaagttagacctgtggacaggctgattggatcttcagcagtatgagaaagtttagttaagccaaggtactatgtaaaactccaagctgtacagagctctgcctggccagctggtcagcacttgggtaatgaggaattgataaatggcaaattgcttcattgaatgattggattaatagtagcatgaatggataaattaacgggaatgggtatataaatgggtatgagatcaggaatattaatggagtcacaagtagatgatgcgtaaatgggactatatgtgtggattgatggatggatggaccctgaaatgcatttttgatggaattagggaacaagaataaatataataggaagtgtggtatgcatgtaagcatgtttgtgtgtgtatgtgtatataggttgatgcaagagtggaagggtagtaaggacaaaaactttggacagctatattgacaatgcaaaataaaaacatgaatgtatgaatgtatgaatttgacggatatgtgcttgaaagaatgaagtcagtttaggaaaggataattaacaaatctcagtaatgattgtaatcatgtgattctcacagtaactgttcaacagtgactgttaaggatgctgcgtgctcatggcagtaactcatgggcagatgtcacaaagacagtaatacctcttattgcttttatgacagcataaggttttatttttcactgtggctttgttagagttatggaaagtcatccattgcctcttaaatacgtaatggtaaattgggtaaaggaattgggtaaatcacatggttttccaaaacttcaggagatttagaagctgtattttatgttttctcaaggaaaggatgaaaaggacacgttaaacactgatagtgtctactgtaggatacctttctggtctcacaaactaggtatactttctacttaaatggaaactatccccttcacagtgggaaccaataaaaacctcacccaggtaaaaatccagcgtctcagtgatgctatctccctatcatgaggtaattcacagtaatctgtaccttaagtctcagtgtacctactgttggcccagagataggtgaaacttaaagataattgtaccttggctgcatgtagtggctcatgcctataatcccagcactttgggaagctgaggcgggcagatcacaccgtcaggagttaaagaccagcctggctaacatggtgaaaccctgtctctactaaaaatacaccacaccctggtgtggtggtgtgtgcctgtaataccagctactcagaacgctgaggcaggagaatcgcttgaacccgggaggcagaggttgcagtgagctgagatcgtgccattgcactccagtctgggcaatagggtgagactccatctcaaaaaaataataattgaaccttatttccttttgtacaatgtacaatgagcagagtcagggcaactataatacaactccaaactctaaggtgtcaaatgtgatagaaatcacttttccattgaaattttgaaatccctctggaaatacactgtgaaggctccctatactgtgctagagagtgttttactagggcctggaagatgctcactttttccttgttttccttggctgtagcttttacctctggcacactttcccaatccccttatcctacttaattatttttaaaataggcattgtggaggatgtttgttcatattttaagtcttaatcatgggcttctagtttctttggaagtaaaagtgacccattaaaaatgtaaaatgtgttatgtgcatcatgggcacaggagtttcgtggcctatatgtgattctaacttatatcttaccatggtgatcgtagaaccatgtgttgatatgtaattttcaaaagaggtgaatgcccttggcacagtaatctgtcatatttagcaaagcttccctgagagccatcataacagacccacaggaatattttcattagtaagaagtagatgtgttcagccagtaaaattttgaagtggccatgacttcaatctgagtacagagggaaagttacacacaataattcagtgattggtggataggtgcgttcaaggaggcagggttggattggtgttttcaagcttggtagtagtagtagacaggcagacatgtgagttgatggaaggatgcaagaatggttactgaaattttctttgtattatatggttaatgtggatttaataactagtcattgaaattatgtgggattggatatttaaagcccagaaagatgaatataataatcgtctaatataatttgaaatataataacggatgcatgcaaaattgggtgtattgaataatgtaagaaatagatggaaagtagaatatgagcaaatggctggatgcaagaatggagaatgcaggttttaaaaacctgttgggtgtatgtatggttatatgcacagtggaatcatttagtgaaggtgcagatggttatatgcctaggtgttatcattggatggatcaaaaatggaatgctgtatggatagatctttagattgatgagtacaaatatggctatctaaaaccttggataaatgtagggatcagggttcaggtacattggttgcataagtgatagctgcctgtttggtggctttagagtggcttaatagactgatagatgggttgattcacaaggtgatggtacaggaatttgatgactatgagaatgggctgatgcaataataaagtcatatatgtaaagttgactggaaagatggacatttgaaagccaatggtatattttcacgggcagattcattatgaaattataaaagttttgtttttgcattctcaacatgatgtgttagcaaataagcaaaaactaactgcagtgggttcacaagttagtttaattaaaatgatctttcaatattttaataatttggggactttaggaggttgaggaatgagagaacttcaccttctgtatattaactggtcgtatgtcacaattttcccatatttttcacagttatagctgaggtggtaccagtttaagaagtgagaacttcttcactgactgaaatttgcatatcaatccaaatcattgtgcttatttactatttttgtagacgtcattcttcaaaagtgctggtaagaatcagtaaccctggtgtactgtttatttttgaccagtttgatattgaatctaatttgtaatattttaaaatccaaaactatacatgaattctataaaacacaaagttgtgaatttgtggagtgattatcagttaggtgaaataaaagagataaaagggctccctaaattttgacacagttttgatatgtagtttatgcaggttttgatttaccagtcttatctactctcaccgtagtatgtaatgtcatctggactgagactataactttttatctgtatactcagtaaattttatattatttcagtaaattttattgaataaatgctctggaataaattcatcagctagagggagataagaaggaagtctggcagcctgtggaaaataaagaaaatggataggctattaaaagatgtcagagaccaaagtcattaggaattagaatttactataaatagtatgggttataatgagagtagcaggtttaattttagttccaagtgcatgatttaggatatcatcagtaagtaggtaaggtcagcagataggagttgaggaatatttcaacattgaagtggtaaaagtagggtcttaacaccctttctttcgatgagtgaatgaaaaatcttcaactattttccaacattcctgtttttcttttttttcacaagcatcttcaatagtcaaggaggacaaagacatctttcctgcaggtaaaatcattaaagactatattgtgattttgaagctgttctatttgctacgttgaggatatattagattcttatttgagttctttgaaattaaatttcttttctcatacatcctactttgtggttatgtgattattttgagtcgatattttaatcaaggactttatagttaactcttgttaataaccaacatttaatgaaatcaggcattttcttgactttagtaccacgagaagttgcacaagaagcatacagggtagcaaggagaattgatgggtggatactgggttttagtttgtggaaagatcttaatggaatacacagagtatcttattagtatttccttatattgtgtcttttaaaaaaattcttaacccctgaattggtgtataaattagaatgaagaaactacacaggaaatgctggttcaaagaataaataggtggttggttggcgtgaaaataatttggaataggagataggtattcaaatcacaaaaaaatgtgtagagaaacgaaggaaaatggcagctttatcatttgcatacagtacgtatacctggtttttgtaggttttgggttattccacatcagattgtaggagttcggttttatggagtattacttgacttgaagatgatatatttctgtcaccaggcatggctgtgtcataacctgttgtttatttccatttgcaatctcttcttctgtactctctcaggtggtgaccatgtggataataggatcatagacaaatggtggttccatctacagcatcaccgaaatgctgttgttactgcttctttctgggatcttcttgcatctttgcttctaaaggggcacaccttttatagaagtacgtccaggaatagaagtgacctgctttttcgcaagtaattgcctggaatgtttttatgtacttctctgcactctcaatacatttcatgcttccctctatttttgtatattaactcattgtatttcttaaatttatattttactttatgaatggaagtgagatttgtgtatggtaaatataattaattcaaccccatggatacgttagtcactgtccagatgatggcaagtctttctcagaagcagagggccttggtgtgccagtgattttttttccccatgtgtaagatactttttttcctcatttgaatcaggagcccacagtttttagacaagtcccaaatgaaatcttaagcatttgtgttatctggactagaccttctgtagtatcctttttgttagacctagtatatctcattgcagatcaggatctgagattgactatagttcacctctttccaagtacacaaacttggatgacatgacaactgagtgtgtaagggagagcgagacccttgcactgccatttgagcccttgtgatctcatcttgtagaacatgttgtacaatcattttattggtatcattagtgttatttggggctggaataaaaatctcagtgcaccaaagagatttcccctttatccacgttaccctggttttcctttgttttctgtttaacctaaacgggcttaatataaaatagtgcttatttggtgttttaattgtctgcttctataacataagctgcactgtccattggggaactgctcaccatattgcccaacctgtcttgataggtttatacatgggaggcattcagtaatattaattacctctctagaccagtgttagcaataacaaacacttgctagaattttaagactatataatcaatcactttgatgtcagttaatcctaccaacacaagattaaaggtttaaaaatctcatacgtgtacagccattagtgtctcctttcatactatattattttgttcattggcagctagatttttaggtagaacttgtgttcctttttgcaatgctcatttattttacctggacagaaggtgctcttctgtctcttctccaaagttaatttatctcatactatttcttgtgttaatattttccaagttcagtatgctgttctggttataagaagatcagtgtcctaatcacacacttttacattatatgaaacatcatacagagttttgtagtctgtataacaatacacagaggtagcaaaatttgtaaaagagcagactatatagtccatactgtagtaactactcaacattgccattatacgtgaaatcggctataaccaattcataaacaaatgaatttggccgtgttctagtaaaacttatttacaaaaacatgtgttaggccagatttggaccacaggctgtagatttctgacctctggcttacagcagaagtttattatgatcctggggaaggtggatatacatggaaggcagaagcgagaagatgtattccatcccatgtcatttttctgaaccctcaacgtaggaagttaaactaaaacatggggcagaatctgctttaagcctttgaattcttggctcttaaagccaggttgagggttatgtgtttttattcttttatatctccttttcacttaggcttggcaactagttcattgaaacagagccaacaagaatgagtgagtcactcagtgatatgaagcaagctgtggtcatttatctactaccttccatacctacttcctaggtttgataagtagtgtttgtagtgtagttgtcagtaacttttctcagcttacataagtttatgtggaattcatttacaaatgtgtgattattacgatagatgttattttataaatttcaaggttctttaatacagcatggacatgtttctaaatcaataaatatagcttacccacagactttttatgggatgtaaagtatgtattacaacaggtaaatccatttctctgttttgggaaagcaggttaatgttttgtttgttttgttgctgcatataatgttgcactatatatatattctaatgcagttggtctcctaattctacaggataaatgtctagctgtggcattgttggatcatcagtttcgtttcagttagatgctgtgaaattgctcttgaaaatggtgtcctctgccaccacagaacggtgttgtaatggaagtgccaattttcataaaaacttgtgtgcaacaggtattaagaatttttgaggtcgggcgcagtagctcacgcctgtaatcccagcactttgggaggcctaggcaggtggatcacctgaggtcaggagttccagaccagcctgaccaacatggtgaaatcccatctccactaaatacaaaaaattagctgggcgtggtggcatatacctgtaatcccagctacttgggaggctaagacaggagaattgcttgaacccaggaggcggaggttgcagtgagccgagattgcaccactacactccagcctgggtgatgagcgaaactccatctcaaaaaaaaaaaaaagctttaaatttttagccaatctaataggtgaaaatggcatttttaacataagtctgacttaaacaattaatggccgtggctaaaagaagaatcaaataatgatgtgtgatttataagataaggaggcagtaccccatttttcctcactctacccaaaaatcctgtttatctgagcaagaaatcattaatattttctaaatccgcttggaagttcataaacgccctaagtataccttataccagcgtttttatgactttgtatttttgaaataattttagattcagaatcgcaagaatcatgcagagcgacctgatttacgcttcacctagattgactttttattctgcatcgttgtgttcttcccccacttcctcttcttgctctcgcctccctttatatgtttatacatagcattatcattttatgtactatttgaatgatttgccgacattatcttcctgtaacccaaaacacttcaacatctactttctaagagcctgagcatcttatattgacttcggtaaaaatttcaaaataatgaaatgtgtcaatagtataaaagtataacagtatgcagtccatattcacattttacccatttttccagaggtgttctttatagcagtttcttcccttctacaacatccagaaaaggatcttctattgcattcaattatcatgtctctttagttttgtttaatctgaaacagtttcctggactttgatcacatcagtgttcttaaaaagtaatagctaacagatttaaggagatacctcagattttgaattttgtgtttcctcatgaaaaggtttaagatactcattttgagcagaaataattcagtattctcagtcttccttagtgaatcatctcaggtgacaaataatgtcactttgtctcactttgaattactttgatctcttggttcgattggtgtccactggacttttccactatagttaacattccttcataattaatttggaactatacaggtattctatttttcatcaaacttccacatagtaggtttaatatgcacaggtgacttttacctgaatcagtgttgattagaaaaaaatctgttattgcttagatgcattatttagtatcttgtactgtaaggaagagtttgtatatcatggcctgtcagaacagtcccgcaatgtgttttatgaactgaaaattctgaaagaataaggtagtgatttatatgagaatacagggaaagggttacccaaagagtctaatgaatttatgtctaaaccatagagtggaatgtgagagacacacagaactccagagttgtgatgcaaatacactgcacagtggaaggagaagaggaagtttttggtaatagtgtttcatctaatgtagctctgtaatgtatgtgtgccttcattattggaagagtgttcaacagttcacagttgaatagactgaagcatgatgctggaatctgggttcagattctagatccgtatcctacatatcaccaatgcttgtttctcaatttttgtttgtcattactttaagtctctttaatgcattagagtatccaaggttgacagtgaagggactgcatttgggagctatctgaagacaaaaacagctttttgaagtttctttcatacgtcaccttacatggcctctcgcattctctgtggagaagtttgtgtagattattcagactaccgtgcagtgactgtgttgtttaaaacctatacatatccaaactctgttttgtgttctctataactagggcattagtctcccaatagtaatcctgcatcttatgctatttaaagaaggttcccagaatacagacattcttacttttgaacaatgacttgggtagattgaggaagtggttttaataatcactttgatatatttcaaaatctggttcattattggtgaggtgcaggccacctggtattaatgaaaatgtgtaattaggaaccagtgcagtggaatcagaggcttgaacatgacctaaggcttggtcaaaagtggtgatctgaatgttccctgctctctgtatgtaactttgtacttagtcttcagtggcagggttgcagcagaggcccagtaaatattgttcattcaacgtatgaaggagaaaatggaagtaaggccaaaaattactgattgtaaacaaatgaagcaccaagtgaataaatgtacaaatagacaagtagccagtaggaaaaaaaacaataattgttacctaaagaatgaaaaccaagtggaaaaggccgccagggacattttaatatgcatattgttgctttcacatataatacagtaagggagtatcagaaaacctgaatctgcctgactaaaacataccctgttccacaaagctatatatatgagagtattgaaggtggtttaataccaaattcaaaaattcagcctcagtgtagcaaacttttaaattttccatgatataaagtaagttttaaccaacaatggaagtcacagcactaaagtacattactattatatgattctctgatggtaatagaaactgtgctgcaggacacgttttgattcaggaagaaatgtggagtaactccacagaggaattcatcctttctaagtttaaatctgaacggaacccatatgcccataccctgaagatgcatgtaagggaacaacatggcttggtctgttgaaaaaagaaaagaaccttcaattaagcattctgtgaacttgataagaggatgcagaggaacgtaaatgcactctgcatatctgtgattgaccttggaacacagtgattgccctctaaagaatagccgagtaagtactgttatcattccaccgatcaaattagagcctcttccttccagtgggagcagagtgacatagaccaaggaaagccgaggagaagattgtagccttttatttctccttatatttgttgaggttcactgctgactgataaacgatttgcacaaaaaaattcaggcctctgactcttctggtatttgatttatctagtaaagttaattccaagacaaaagtacagttggttaaaaataccagtctcatgtttatttgatggtttgaaatattctgttacattgttgtatctcgtttgtcaccttggaatatatgacaatcatgttatcttgattttttccacaagataatttgattctaaaatcgattcattgtttatcttcaggaattagagattttaaaaatgtcatctcatgtctcattcagtcatttccaagatttagcgagtgttctccctaatgccttggataagaatgccttgttcaatggctgtattttactcataattagcattccaactgctttgggtttttttagatttacaatttttatttctgcagtacttaactttctatattttatgtatattaaaacaagttaggtaggatgaagatcactggatgatataaatactaatagcaaaagtagaaataagttgtattatataagttgtacataggtgttacattaggttgtcttacatgaaagtattacaaagtatgggatttggggtgtattttgaaatccttgccagttctacttgataaagtattgaatggtatcatgtgagaggagaagaggacggaaacaggacttatgatttagacctcaacaactgctagggagggttggttttctctgagtgcatgattttttataaaaatgctattttgccagttttagatccatattaaacccacagattaaggttttggtttttaaagtgtaaataggaagcttgagctgggggggaatttggaggtagagataatacttaatcgctgtgggaaaggatgagatctagagatagagtgtatgtgggagtaggaacatatgtgtctgagaccatgctttggatgctctagcatttagatattgagaaaatgaggaagacccattaaaggagattgtggctagagttactggtgaaaaccaaagggttgtagtgttcctgaagatacatgaagagtgagattaaaaattaatggggcagcagtggcttttgcatggcattgaaaagacacagttcaatttgaaaattgagtatcattaatcgtagtgctcttattattgaaaaggccaaatcaaacaatacctttgagttgatggtctgtactataattaggttaccattgttagcccagcatagacacatgctgatacctgtgagttgctttcatcaattagtatgtgaagatgcatcccagttgtacaattttagatcctcttcatcattccacattatatgtatacaagataaaacttgatgttttcattacatcctttcaatcttctaacagcagtccttacgtagctttatcattggagtttccacttgcagtgtctctatctgtacctgcattcattggccacggtagagttttcattacggcaggattgcatttcattgttttggcttgtgtcagacatttagcaaagattgttgaggaaaggaatggatggaaggggccagctgaaagaaaaagtaacaacctaatgatggataagtgaaaaaggaatgaagaaaggatggtgctaggaatcgagggagtaaagcaagatagaatgtacaaaaggtcgaatttttaaagaaagttgtagggcaagggcaaggtgtgttgaacctacatttaaaatacaataacatcactaaagtcgaggccgggtgtggtggctcacccctgtaatcccagcactttgggaggccaaggcaggcagattacctgaggtcagaagtttgagaccatcctggccaacatggtaaaaccccatctctactaaaaatacaaaaattagctgggcgtggtggcgggcgcctgtaatcccagttacttgggaggctgaggcaggagaatcacttgaacctgggaggcggaggctgcagtgagccaagatcatgtcactgtactccagcctgggcgacaagaatgaaactctgtctcaaaaaaaaaaaaaacccatcactaaaatcagggagaaaaaaaccatcactaaagtcagggataaagtaccattgtggaaggtgttcttttccagcttaacctgaagaattgtacagtcattgtacattgtcattccctaactaatgggttagatatgagtctgtagaaaattgtttgtccaacatactttatgcctcttaacatttcacttaccaaatttcatttcattccttcattttgtgtctaacagactagaaataatgagctcctattgacagggatattttcctcttcatactttcctttaccttacagagccttttatgtagcagatatttaatttcataatgggtctaaactacttgtttagaccatggatgagtgaaattttgatgaatgagccccaatcacctgaagggtgagtaaaagaagaatttctagagacccaatatgaagtagctgcttcacacttttttgagaatgttatggcatgactgaggaaatcatagatgctgtagaccatgttgagttggattgtgtaaatatagattctggtattagggaactcagcatctgctggattagacttcttatggtgaaagtctttttttagggattaggcataaatccccactgatatttgtgcagtaatagagtatagctcctgttttctttcctgcttgtatagcctgtgccattagtgtcctctttctcactgttttctcaaaggaaaacagtcaaagaggaagccatatgcatggtagactttgtaatccgggaaaagtcaacatatttcatagtagtgcactttttatgtgttgtcagtccttagaaaggattcattttctccatattatatactactctattttaaaaatttcttgggggagaatggctgtagacaggccaatgatagaatcatagaatatagtcactgtctaattactttcaatcaagagagggaacaataaagtacaatgtatgtcgctgacttcagtgtgaccactcagtatttctgtaacacagtatttatattgctgtacggtagagttatacttatttctgtgatccagttcatttgtttaatattgggattcaaggagtgttgaagaaatgtctactgattaataacagatgggaagagtgtatgtgttttaaataagagaccaagagagacaataaggaaaataagaaggaagtgtttgtgaacctttcacattactcttacattcgggaagtccacaagacaccgtagtggagattctgaggaggtgaaaacctgtagaaaaatgctttattagtaaggagctgactaagttgtcagaaagtgttgatttttagaaggatattgagacattgggtatatagggtatatgactccttgtcttcctttcattctggcttcttaccagctgttgtgaataagtttaagatttcttctgacgttataaacttcagaaaaggtatggctgtttgttcagtttgaagtagtatcatatccgccaaagccttgttcaattgtcttgttgattcatggttctcttcagtgataatattatatgggattcctacccacagccacccaatatctcagtggagaaatgcaggtttggagagaacatctgaatagaatcacgctaagatggtacatttgcactgagaccattgttatgtggcaggcagacatgaagtatcctaggattgatcagtatgccttaatgtaaatagctgcatatagacctgatttcttaggctccccacttcaagctcttgaatattgtgttgatatccttatcaatacactttgtcttgtgttctgtgttgtttttccaaaatataacgagctcctacttgacagggattttttctttctattgtcttacgataaaatgtcaagataaaaatgtatgagtttcattaaagtttattgaataaaatttgtgatggaatgagtgacagcgaggtcatgaatgagagagaatatggaaataatggagaatgtgatattctgatagtcatgcaatattctttttgatataatatgtaacatatattagtatgttatattctatgtattatttgtcatatattattactatatcctgttgctatatttggataatttgggaatctgccatgtttgatgatgttgaaaagagaacataaaatgtagtgatttcttaataaggtgtagaggtgtaggtattaactctttaagaatatagtgatttattttaaaataatgataggaaaggaccataaaaatgtctgaatttgggaaattagaaaatgttttctctctggggctttcatatgtctgttctatgtgaatgtcgctttgccatggctccctctttgctaactcttcttaacccctgcagagaaggaagtgtagtgatggtattttgagtccatcttcaggtttattgggaatgcaagggaaatgagttgttaccaatgggagtaaagggctagttgctatgccagtagctgctacttttgacactgcttgagcaatctgaatggctaggtttgaatctggcttctcagtcagaattttaccttcactctaatgctgctttttttcaaatcacctatatttacataaatatgaaccaacttcagtgatcttaattctttcccgaagatccaagtttctttccatctgcctgaagaactttctttagcacttctggtatagcagacctactgatgataatttttcttttagtatatggtgattagtttactttttattcaactgtgtctttttttgaagtcttcttcattgaaatatattgttactaaatatagaattaatggctttctttaagcacttcaaagataatccactgttttctggactccgttgatacttaagtctttatttttgtgtaattctttttctttaaatgtgccatttttcatttttctctgactcctacctactaagatatttttacctaagtattgagtcagttttggttatgatgtgactcagtgtgtttttatttatattgtttggttgtttgaacttcttgaatctgtaaatgttgtgctttatgttaaatttggggggatttcagccatttaaaatataacttttcagtctcttccccctgggactccaatttttacatatgtattagacctattaatatttttctatggatacctgacattctttttaaatcttatttttggtgtttttcactttgaacaacctaataatttgtttccatccatgttcactcactgtttattctattttttcccaatctgctcttaagcctatcctgtgaattttctttttaatttattttattttttagttccagatattttctgctttttgtttgtttttgagacagaatctttctctgtcacacagggtggagtgcagtgtcatggttcaccgcagccttgacctcctggtctcaagtgatcctctcaccttaacctacccactcctaagtagctagaactacaggtgcatgccaccacgctcagctaattttttatttttgtagagatggggtcgttgtgttgcccaagctggtcttgaactcccagactcaagcagtcttcctgcctcggcctcatgcccgcgccaaccagttctttatttttaatattatgttgtatttgatgtgctatcctattcatttagtataagcacatttttctttatgtcttcagcataattatatgctttttcagaattttaacatcaggactgcttccagggtagctttattgccctttgtcttaagtatggattatagttttcattctttgtatgtcaagtaattttggattgtaacttgaactttgaatatactgtagaaactctgaattctattttattcttctaaaacaatatttctcagcttcagcactactgacattttgaactgggtcattttgtttgtgttgttgtgtgtattttgggagggtactgttctatatgcattgtggggtactgagtattatcctttgtctccactcactacttaccagtagcataactctctctcctccccacatcccctgccaaaaaatgccttcagtcctttctaagcgctcttttttatggtgttggggccaaaatcatgcatctttactcactctttctcattgagagctatggctataaagggtagtgatacttttacttatttatttttaaggcaagcagttaacttagctggattcaaactccaggctgcctcgtgtgctgtgggaagcagcctacgctctattcagttcttttcttttcatattggttgggttactttgagtctggcctacatgatgggcagtttagaggtcaaccaaaggatttcagcagaacttatacacagaatttcattcaggcttcccgtgtctgattggctacagtgtgggaatttcctcccacttttcagccactactgaggatgcctttcggcaaaattccttgaaattggaaacttacagggaaattcctttcctccaagagtgcgctctcctccagtgttggcttgcttttggttgttctccgtggttttagatagctgtctttatattaattctggagtttacagttgatatctgttgggggcttagtttgataacatgtattcttctattactagtagccagacctgtatgtcttacttgacctgatggagaaaagtttcaacttatgagacaatactgtgctagctagttttactgatttgtactctaaagtacccaagcctaaaatagtagagctgtctatcccacatgaaacttctctgattttcactgttttttataaaaagtatacatgttcacatttctgtaggtttttttaagcatcacaatttttataaactttctatatttccaaggtctacctgctttgtattttgcctagtgagagttttgtattcatgtaggaataatctcttggtgtgagtatctattttccactcatccaaaacagatagagcattgatttcactaagcgttatgttctagtttgctttggtattattattagaaatacctggtgattaatttgagctaagtattcttctctaccctcattcccagcattatcacccgcttttaccacttccaaggggtggaagcattctccacaatgcattttttcatgccagagaaaaatctagaaaaaaatgaataaaacgaagaaattctttccccttggtatctgtagctaacttgcctaagtgttctttcccacagtttaagtcttcagtccatagttcataagcaaaggggtgtagcgagctctgatcttgccagaagagagaataagtgagctaccccacggtggacattctggccatctgaaatgagtcgatgcatgtggcttttgtctaaaggctacaaataaaatgtaaccactttcttctttgagtagttgatatagcaaatagttgaaacagaagttttgattggcaaatcaggatgtggtagatactttaacaaagagtagaactattaccagttttatgtgttgctgtttgtatctctttcacagttttgataatatcacatcctggaaagtgaaacagaaaattattattccattttaaatgactaaatttgctttcatggtatttacagtgaaagagtaaattagaaagtgaatggatgactgttcatgagaaaaagcagggtaaaaagattttatttaattaattgaaaatattagggtcaaaacataggcttatgttatgttttgtgaattgtgctgtgttgtagacatttgatgagtcctaacatagaattgatctagctcttgaaataccatttttgattgagtataaatgggatataggcaccttacaacttcagaattcgaggaagatgatgtgaatcttccaattttatctatttgattcaaatggtatgttttttcacatttctcataatttccacgtcaactcccatgatgatcatgcaggaaagcagcatgattgcacttcttgtagtgcataccatcactaaaacatagttactgtctttctgtggtcttaagaaaaattcagaaacagcataccaatgtacatataagataaataagcttatgtggtacagtaagtgttctgttctgagaaataccttgattcgtatcctaatgtctgatgttattggtagttctcaaacttccccaattctgctttcatctaaattcatcttatctatctattgttaaataatctatcagtccatttttatctatcatctatatatctgtctttatcaatcattcgtctgtaatctatctgtgccgtttggcataagagacagaagggcatagcagtggaaactcaaaggagttacctccatgtgaatggacagtggtgatggtgatctgtgaggtggtgatgtatagaaagaaaaactagaagagagcatgccctaactcagggaccttgtccagcaggcactctggccttgttatactgtgcttgaatatgaaaaaaaaaaaaatcaaaatagtgctgacattctttgtcttctgggtctgagaaaacttagagtagatatgatgactctgccatttcagtcttttgtatttccacatttagagctcagttttaattatgtagaattatttctccagcctgtgttaaactagaccatggattggcaaactttttttgtaaattgccaaatacacattttcagttctgaaagccttgtggtctttgttgcagctaatctactctgctgttgtgttatgaaagcagccataggtaatttataattgaatgagtgcgctgtgcctttcttccaataaaactttacaaaagcatcctgtgggctggagtttaccctttgggaaaccagagcattggctaaactggaacctgaaaaaataatcacatcaactcagccacatggtaataatatttagagtattatttcaacattttcattttcataaaaatttttttagctcttttgccaaattccatctgtgagtgatacaaatgactaccacgtgccattaacatcacctaaacagtgcaaaacaagcatagtagaagtaattggaatgatataaaccccttgctgtaatagttatagttgataaattatgtttcaaaattgaacctatttcttccaaatttcatctataaagttccaaggagttccaaaatcttgcctgccttcttttcccagttagcagtattgtctctgagcagccatggtggtatccatcctccttggacaatgaatttagcctattttgacttcatttgagcagttgtaattgtttcaccacatcagagtaagattactacatgccagagctattctttaactcagcttgtaaaaacatgatagcatcaacaatatacatagcaaatgaatgccatctttaatccaattaaatggtttttacaaatttgctcttgtttgttgatgctatctgcattgcagtaattaaaggtgaggtaaaaagaatgaataaactgccaagttaaaattaaatttgggcaatttctcttttgcagtaatgtatgtatatttactcaaaacatatgccaaatttagtgttgaaaggctcattcaaatcaattgggaaagcacgtaaatgaacaattcataaaagaaaagcattgcaaatggccaagagcatagaaaatgtgctcaatcttaccagtcattataaggaaataatgaaatttgtgtatatatgaaatacttaaaatatatataaaataaaacaattatttgccttttttcacctatcagattaacagattatatgtgttaacaaggtggggagaatttacaactcctgatatgttaaaatctttcaggaaggtagtagaaaatatatgtaagatggaaattagcacttttgaccaacaattttagttttagatatttacctataaggatataataggaggtgttcaaagatgcatgtaactcaatgtagtattaattataattgtaaaatagtaaataacatttttgtcaaatcataatgttaggaaaattagtgatggcacatttaaccaattgaattatattcagttctgaataccgtgatgcatgttcaaattaattgatacaaaaatccaacaactttagcagtttgtttaccagttattgagtaccaactgtgttcaacattgttatttcactcatatgaaatgataaatgtatgtgcgtgttatgatacggtcaataaaaccacttttataggaagaatactcacaaaatacagcgagttctggtcattattttattgttgcatttgtgtgtttgtgtgttttgaatacatacatgtatttcaattaactatagcatttattgaatttttatcacatgtaccagatggggagatcaacactttacatgaattataagttataatataataacttatataatgttattatataataacttattattataataacagatggaataacgaatttgtctttttaaaagataagtaaattgaggttgagtttgaattttgtaattcattctattatatagaagttaaataaacctatcctaggatgtcacaacctttggataataataattaaaaatacttatgatttattaaacccattgagcaaaatcatgttttgtgaaagaacccacatttcagaagtcatattcattcttcttttgtctttaaggccagagacatgataattattaagtgcagcttctcaggacagaaagtgtaagtgttggtatattgtaggaacaggagaaaaacatgaataggaacttgtcttttggaaattcttacagtataaacctttaaggagttacttctagaaatatggggtgcctttgctcaggatgtggaacaacatgttcccgggcagaaaccatattatacacaaagctctgagacatcatggaggcacagatgaaagtccaaagagaaatggccagtagaaagaggatcactaaatggaagaagctaactttggaatagagctggtgacaggtaatatgatgacttaaatgctgccaatagcagggaaaaggtccatggtaatatctgagtgaagaaacaattgccaactgatctagatttgaagggcataacctcttggaatatttttccagtgtaatttgtgatcatatggtctggattctacaaaatctcccccattctacaaaatctataatcagttctcttccattttcttcattcattctaacccttttctaaagacggcactttgtgtcttgtgaatgcaatcccttagcagttctcagctagtagctgaaactttggttaaaatggtaagcatgggggattgtgacataaattttgctttgctatggcagttattgaaatatttttataattttgactatttgtcatgtaaggaatgcacagtgccattctaactgtgtatattctggtatttggggggttggaaattgactatatgagattcttgcagctgggtctctgacatgttgagaatgctgaagaagaaaaagtacagaaggagaaagcagagatggggaaagctgcatccctcaaataggataccactggatactgagcagtgaacaacctctggttttgtcggacaccattttggaatatttggacacagtttccggaaggatgagagacctaatcaatggtagtaagatgtttaaaatattattaatacgaatgaatgcttaggcaaggttgacggtaaagctcttctgtacaataggtagcgttaataaagaaatgacaagatttggaaaatcagtatttggaaataatcataattgtttcagccaggaatcatcaaatgatgctaaaacttggagaaaattttaagagaaacaggacatttggtgtccttatcagttacaaagggaaagtagtagcttcctgatggagaacatggttgacagcacctgaattaaagaggtgaaagttaataccacagtagtgggaacatcaggcagcgctgataggatgcactgagaagaacacagtctcatttctgtagtattactgactaaactgcagaaacctgagtctacccatgaggaaacatcagtctcaaattgactgatattttgcttttagtattcaaacatactaatttcactgaggaaatggtccagattatttcagactatatagacatgagaatggaatatcacattggttcaggatgtctataaaaggataaggaaggttggcaaaatttgaagacagtccctcaagtagattatagtgttacgtgagtattaattgcctaagttatataattgcctgaggttatataacagaaaattcttgtttttaagaaattaaaacaatttaaaggataaagggataatgtcatagctgtaattttccaagcatttggataaaataatatacatgtttcaaaaaaaaaatgaaacagatgttgtaagatgttagcaaatagggaatccaggtggaaataatccaggaattatggatagtcttgtatctgttcagcaggtctgaaagtagttgatgaaaataatgcaaaagaacatgtcaaaaagaaatggtttgggcatatggcttcaagcatacataaatgctcaggaaacatgaaaatgtgaaataaatggatgagtactataataccagcaggccttgtagatacctgcatttgaagcatttatattagaaggaagcctttttacccagaatttttttcacttagcctaatgttttcaaggtttggccatgttgcagcatatatcagatctccattttttttgatggaggagtgatattctattgtataaatatatcacattttgctcatccactcactagtttttggctattatgactaatcccgccaggaatatttatgtggaggtttttgtgtgtttatgttttcaattctattatacatgagaatatagtaactgtgtttatttgacattttgaggacctgtctgtaagtgatgtttaagataatttttgttacatttgaaggcagataatagtctatgcaaaatgaatattctgttgaatattgatgtgaactattcttattgtaaaaaaaaagttacattgaaatagtaagtatagaagttatatcttggtggcggggcgtggtggctcatgcctgtaatcccagcactttgggaggccgaggcaggtggatcacagggtcaggagatcgagaccatcctggctaacatgatgaaaccccatctttactaaaaatacaaaaaattagctgtgcgtggtgatgagcgcctgtagtcccagctactcaggaggctgaggcaggagaatcacttgaacccaggaggcggagcttgcagtgagctgagattgtgccactgtactccagcctgggtgacagagcgagactctgtttcacccaaaaaaaaaaaaaaaaaaaaaaaaaagtattggtttttgtactcaacaagcagttttatgtttttatttttcaggaactctccaatactgaattcaggctgggatattagagaaaaggaaaatacatgaaactcagtggtgttttatggcactttgagttccccaattcaccttcaaacatttagccttccaagttctctgccaccgtatcagtgcatccctcctgagattcttaattctttgattgtgtaaagatggactatgcttactccatcttacttctcttaggtcttacaatggaagtgccctattacattttgttcttttctatgatttccaattattttatgaaatttttcatttattttttctgttctttctatctttaatttctatgtaactttttgaaatagatctcaaagattttatatatatatatatatatatatatacacacacacacagagagagagatatatatctactgtactattgaagtagattcctaaagtttttatctcttctagaatattggtttcacaacacccctattatgtgtatttaattttacccaccacatggcgttttcaaaaagtctttatttggcggaatacaacttcagaatctgattcgaagagaaaattgctcacagccgtgagccactgtgcctggccgatttttactatttaaagaaggaagaattttagcagcgtggggtggctcatgcctgtaatcccagcactttgggaggctgaggtgggcggatcacttgaggccagtagttcaagaacagcctggccaacatgacgaaaccccatctctactaaaaatacaaaaattagccaggcgtggtggcacgtgcctgtagtcccagctactcgaaggcttaggcaggagaatcgcttgaatcagagacagggaggctgcaatgagccgagattgcaccactgcactccagcctgggcgacagtgcaagactccatctcaaaaataaagaggaattggaggaggaaataaatgaataaatgacaaaggtgacaaaggaccaaagatctgtgacttgtgcaaagattgctctgtggtaattattacagaaacaatgtttgtatcttattttttagggaattttgtatattgtctaatctgatttactttgtttttaatagtttgctgcaggtctagaagatgtcacagaatttcaaggaagagaggtgagcagctgctgtggtgattttgaaattgtttgtgtgtgttgtggccagtgatgtcagaatttcaggatctgagagttcatgattttagaggctcaaaggagaatatttttataacttttttctataatttttttataatttttttatatattttttataatattttataattttttttgctatgtgagtatccctactttgttcaaggaatctcattatcttttccctttttttaaaaagggatttttttgtagtaacctgaataaattgggggaagtattgatatatttccttttctcaccattttttgttggatgaaaataatcttttagtgaaattcagtgtattaaatatttattttttaaagtctagagatggggtcatgctgtgtttcccaggctgcccttgaactcctgggctcaagcaatcatcttgcctcaacctcctgagtagctgggactacaggcatgtgctgccatgcctggcttaaatatttaaaaaattttatctggcacattctgaacacagatgtttctacttatatttgtcatgtagtcacagtatatattgattttgctacctcgcctactcctaaaagttttaattcatttaattggtcttaattggacttaaaaattttttccctggccgggcgccttggctcacgcctgtaatcccagcactttgggaagccgaggcaggcgtttgagaccagcctgaccaacatggagaaaccctgtctctactaataatacaaaattagctgggtggggtggcacatgcctgtaatcccagctactcaggaggctgaggcaggagaatcacttgaacccgggaggcagaggttgcagtgagctgaaattgtgccattgcactccagcctggacaacaagagcaaaactctgtctcaaaaaaaaaaaaattcccaatagattttaatctaattttattagaacaattcagtcatatgttttttcatgctatgtatatgagagttccattattcagatactaaacaaatgtctactgtacatttactcttctcactgatgatggattagataaccatgcacaaaataagcctggctgtggaaatgcttatttgttgggagggtgcttgtttggatcgatgatgagaataattgtctgaggatgctgagggactcattccagatgtcaatctgaggtccagatgtgtggccctccaataggacaaataagactctcagagcctggctctatttggggatccctcagtgacaacatagtacctctgtgagcgtgccttttctatctctccgaagagggcattagcatcctgtcttatgagtcagtatgcactttagtatggttagtgacccaagactcactttattttgttcattttgagcagagaattgtagatagatacatatatgggaaatatgttcttgattaacaaatgaaaaaatgaaaaagtttcagtcaagaaaggtcaaggaactgtgatgtatagtgaaggcagggaacactgcatgcctgtattaaatattgacaaaggaaccaattttagtgctttgttatttttactgttgagtattttctgagaccatttctttttcttctattttgttttgctgaggtagaggagggctggaatgaggtcctccacttcagaaaataggggtgagtagttaaaccaacatcctttggaattcatatacgtcatgcgttccatgccacatcctgagatctttttgttgatttttttagtggcttactggataatatctaaatactgtatattttactttggtgagtctctccaccttcatttctgaatcattgtcctttacatttttattctatttgaattttgcatgaaatgacaaatgtagaattttgcccaatttattttatttattcatttatttatttgggaagacaaagtctctctctgtcacccaggctggagtacattggcccagtcagagctcacttcagctcttcaccctgtagcccttaactcctgggctcaagtgatcctccaccctcagcctcccaagtatctaggaatacaggtatgtgttaccacacatagctaatttttaaattttttattttgtgaagataggatcttactgtgttgctaaggctggtcttgaactactgggctcaagcagtcctcttgttttggcttcccaaagtgctaggattacaggcaggagccaccatgcctggcatcattagggatattggtctgtgattcacttttgatgatgtctttggttttgataaaaattagggtaatagtagactcatggaataagttgggaaatgttttctgctctcctgttttttggaagagttgtgaaggattgatgttatttctttaatgatttggtagaattcatcagagaaatcatttgtgtggaattttatttgtggaaacttgagtagctaattcaatctcttgttaaaggtgacttcaattttctgtttttccttcttgtgacagttcctgtaatttatatatttctaggaatgtgcctatttaatctaggttatgtaatttgttgacataacttgtttatataagggtgttagtctgattttcatcccagattttatgaaaattgggtcttctgttttcagtagtgtagatatagttatgtcaattttttaagagacagagtcttactgtgttgtttatgctggccttgaacttctgagcctaagcaatcctgctacctctgcatcttgagtaggtgggagtgtgggaacacaccaccacacctggcctgtcactaaacaaacaaaaaatttcagtgaaccagcttttgatatttttatttttcttctgtattttttattttatttattggcattttattcttatatcttttattctacttgatttagctttgctttgtttttctgttttcttaaggtaaaagtttagattattgatttgagattttcctttttttaatatggacatttacagctataaatttcccaaagaactcttttagctacatatatattttcttttgttgtgttttgtttcctttgatttcaaactattttataaattttcttatttctcccaagaactcccaatgattcttagtaatgtgttaatttccatatattgtgaattccccccaatttttttcctttatttctgatatgattctattgtggttggacaccatacttttctgatttctttactttcagatttgttgataccagtgtgtggtctaatacctaccctgcacactgttccatgtgcacttgaaaataatatattttctactggttagattgttccatagatggatgttatgtaactgttttatagtgttgtttgtcttctatttccttgatcttctgtctcattgttatgttcatcattgaaagtgaggtattgaaattttcagttattataatgtttattttgccttccattctgtcatttttaaaatttaatttgggggttatgttgttggatgcacgtatctttattattgttatatcttcctgatggattgacagtttaatcatcatgaaatgtcctttgtctctaccaacaatttttttttttttgagatggagtctcgctctgttgcccaggctggagtgcagtggcaccatctctgctcaccacaagctccgcctcctgggttcacaccattctcctgcctcagcctcccgagtagctgggattacaggcacctgtcaccacgcctggctaattttttgtatttttagtagagacggggtttcaccatgttagccaggatggtctcgatctcctgacctcgtgatccacccacctcggcctcccaaagtgctgggattacaggcgtgagccaccgtgcctggccctctaccaacaatttttatcttgaaatttatttagcctgataattgtagtttttgtctgacttatagcccataaactctctctggttactgtatgcagtttatcttgtcattattttactatctacctatttttaattaaaacaaaatatctttgagacaggatctcactctctcacccatgctgtagcgcaatggcatgatcatagctcactgcaacctgaaactcttgtaattcaagcaattcttccacctcagcctcctgagtatctgaaactacaggccaacaccaccacacctggctaatttttttgtattttttttcttgtagagatgaaatcttggtatcttgcccaggatggttattttctacctattttttgtccttgaatctaaagtgtatcttttgtagagagcatatagttgtatcatgtgtttttttaaaaagatacatctctgccttttaagtggagagtttacttcatgaacatttaatgtaattactgataaggtaaaattcacatctgccattttctattttcttttatggcatatatctgttttgtttttcttattgttctttatgttaaataagtaatagtgtactgctttaattttctttttaattttttgtgtttacttattagtggttgcctttgagattatagttaatttgttaatttataatatagcttagatttaatagttaattttaatagtacacagaaactatttttcaatatagctctgttttctcacccttccttttgtatattattgtcattcaaacatttataccatcttttatatttgcctaataattattttactggtcctgtgcatttcttcatatggatcaaagttaatgtctagtgctatttcacttaaggctgaagtctccatttaatttttctggtaggataggtattttgacaaattcagcttttgttggtttagaatgtcatttcttttttatttttgaagagtacttttgctgtttcaagatctatgggtagacagtcttacttctttttctttaaaatagtttgaatatgttatcttactgttttatggcttcaagagtttctgatgagaaatcagctgttagtctcattgaggattccttgtacctgatgggtttgtttttctcttcatattttgaagactggcttttgaaatttttactatgacgtctccatgtctttatgtgtatctcacttgagtgagtcaagttcatttgactcattttatatgtacatgtatgtttttcccttacattaaggaaattttaggcgtttgttcttcaaactgtttctgcccttctactgtgacttttatgaacatgttgatatgctgtgttcctcagttctctgaagctgtttttcttttttctttctgcttcacagaatggatctcctcaactgtcctgtattcaaattcgattaccttttcctgctagctcaaatagtgtgattaaatttttctagtgaatttttattatttatttctctgtatctttattgtctagtaattgatacatttttaaaaaatttaaattttaggtttaggagtacatgtgcaagtttgttatataggtagattgtgagtcatgttggtttggtgtacagattatttcattacccaggtaataagcatagtacctgataggtagttttttgatcctcactctcctcccaccttctaccttcaagtgctcccagttacaagagagaatgtatggcatttagtttactgttcctgcatcaatgtgcttaggattatggcctccagctctattcatgttgctgtaaagaacatgatttcattcttttttcatggctacatagtattccaaggtgaaaatgctccatattttctatgtccagtctaccagtgtgatagttaatattgagtgtcaacttgattggattgaaggatgcacagtattgttcctggatgtgtctctgtgaaggtgttgccaaaggagattaaaatttgagtcagtgaattgggagagacagattcaccctcaatctgggtgggcacaatctaatcagctgcacagtctcatcagctgctggtagaataaagcaagcagaagaatatagaaggactagactgtctgagtcttccagccttcatctttcacccatgctagatgcttcctgcccttgaacattggacttcaagctcttgtactcttggacttacaccagttgtttgcaaggggctctcaggccttcagcccacactgttggcttcccgacttttgaggttttgggactcagactagcttccttgctcctcagcttgcagaggaactattatgggacttcaccttgtgattgtgtgagtccatcctccttaataaactcccttttatatatacatctatcctattagtcctgtccttctgggaaaccctgactaatacaaccagtcctgggtacctgggttgattgtatgtctttgctcttgtgaataccacagtgatgaacattgaagtgcatgtgtcttttggtagaatgatttattttcttttgggtatataccagaaatgggattgttgggtgaaactgtagctctgttttaagttatttgagaaattctcagactgttttcctcagtgaccggactaatttacattcccaccaacagtgtttaaacattcccctttttcttcaggcttgccaggatctttctcttttttgcttttaataatagccattctgacgttgtgagatactatcttattgtggggttttttttgttgtcgtcgttgtttgtttttcgagacagagtcgcccagggtggagtgcagtggtgtgatctctgctcactgcagcctatgcctcccgggttcaagcgattctcctgccttagagtcccaagtagctgggactgcaggcgtgtgccaccatgcctggctactttttgtatttttagtacagatggggtttcaccatgttggccaggctggtctcgaactcgtgaccttgagtgatccaccaccatggcctcccactgctgggattacaggcatgagccaccgcatcgggcccttatggtggttttgatttgaatttctctgatgattagtgatactaagagcattttttcatatgtttgttgaccattctatatcttcttttgaaaagtgcctcttaatggggttgatttttgcttgttgatttatttaagtgccctatagattcaggatattaggcttctgtcaaatgcatagtttgtcaatgatctctgttcgccaatgatatggttctatacctagaaaatgccttctttaagaaaataaaattgtattttgtggatgtatcacattttccttatatatctgctttgggcatttgggttgcttctgcctcttgggcattatgaataatgctacagtgaatatggatatgcagatgtatgtttgagatcttgctttgaattactttggatatatacccaaaagtgggattcctggatcatatggtaattctattgttaatttttcaggaacctccatacatttttccacaatggctgtaccattttatgttcccatcaacagcatgcaaaggttccagtttctccacattgtcaccaacacttgctgttttttatttcactcttgttgcccaggctggagtgcaatggcactgtcttggttcactgcaacctccacctcctgagttcaagcgattctcctgcctcagtctccccgagtagctgggattacaggtgcctgccaccatgcccagctaatttttatatttttagtagagacagggtttcaccatgttggccaggctggtcttgaactcctgacctcaggtgatccacctgccttggcctcccaaagtgctgggattataggcctgagccaccacgcctggctcgttgtttttcaattgtatcttctaatggatgtgaggtgatacctcattatggttttgatttgcatttgtttagtaattagtgatactgagcatgttttcatatacctgttgtccatttgtttatcttctttggaaaaaaatctattcaattactttgccccttttttaaaattagggttttttgttgtaatctgagtttgttccctccctccctcactctctccctccctctcttccctccttccctccctccttccttccttccttccttccttccttccttccttccttccttccttccttccttcctttcttccttccttccctccctccctgtctccctccctgtctccctccatgtctccctccctgtctccctccctccctcccttcttttctcccttcctccctcccttcctccctccctttctcccttcctcccttccttgatcacatccacatccttccttccttcgtgctgtgttgctcagcatggagagcagtgccaaaatcatggctcactgcagcctcaactttccaggtgccagagagcctcccacctcgtgctcgtgggaccacaggcacatgccaacacgtctagctaattgttttttaatttttattttttggtagatatgggggtctcactgtgttgcacaggctggtttcaaactcataggctcaaggaatcttcaaaccatggcctctcaaagtgttgacattacaggcatgagttaccatgcccatcctgcatgtgaaagccttacgagatatgatatgcaaatatttctctcatttggtacgtttcctctttcattctgttgattgtttcccttcatgtacaaacattttaggtttgatgtagtcttgcttgtctgtttttgcttttgttggttatacttttagtgtcacattcaaaaacttattgacaaaaacaagaagggtttccatgtgttttcttctagttttacaatgtcaagatgtatctttaagtacttaatttattttgagttgatttttgtgtatgttgtaaggtaaggattcagtttactttttttttttaatttgcggatatccagtatgccaaatatgattagttagataaactgtgctctgagcacccatgtcaaagataaattgagtagagtacatggatttatttctgcattcttcattcttttccattagattatgtctgttttttgccagtattctagtattttgaattactatagctttgttatatacttggaaatcaagaagtgcctccacctttgtgtttcatgctgaatattgatttagctattttggttcttttgtggatccagataaattgtatgatttttttctctatttctggaaaaatgtgattgtgattttgataggaattatagtgaatcagtagataactttgggtagtatggatattttgacaatattaattagtcccagtggtggtgttgaggccgtgttgacctggaggcactggggtcagtgatagtgttgtcaagttggctgcaggatgggatggtgcctgggaggtcagtgcataaaaatcctatggatgtgatcaaggaaagggtgatggaaggtgatgtgtcctgtctgcttggtccttgtaggatcaggcaggacatcctgtaataaaaggagacattaccttcggatgtcctgagggcatggtgcaggcaccaggactgagtggaggggaggaagctcatgtcttgaggtcctttggctacatggggaagactgtctctgggcttgatgctgagttccagactgacgtgctggctgttgtgatggtgctctccagtgctggttgtggttggtttttggctaggtacacctcacctgggacagtggccaaagacagtgtcagttccagacatcagaagccccatgaggaagagcatgtgctcgcgccaggagtggtggctgttaggggagggacctcagacctatgtctgcatggcctgaggtcagagttcacatcctactgattgaagaccttgttcttgagctgtccggttgccacagggtcggacctggaggctgcagaccatcgtggccctttgcagtgttcggaaacatatgcgcaccccagggagggacacacacacacacacacacacacacacacacacacacacacacgcaaactcacaaacacaacacacagacagaaaatgacaaataaacacacacactcacacacacacacacaggagcccacagaaaaaagcaaatagacgcagaaacgggcacgtgcagtagttctggccacacatgttccctaggtatccacagaatggcatgggtattgtatattcataaagatggagatcagtcatggaggccaaggacaagtaggtgcactggttgaactacagtagagaatggcatggaagtggtgagcaatggacctgggcctgtttctcaagtgtgtatttgatttctttacaattccccggagaagttgtcatgggaggccagccgcctgctggcaaggaagatggttgattcttctgatcaatggaggccctgcagagtcctgtagtcactgtggcctggcatccatggtgcacccaatgctggtggatggcttaggacggtaagcattcctctgccccacgtgctgaatgagagtggcttttggatgtcctataccttcaaggagctgtttgtcagcagcgaatgacatggcaagttccactcctagagtggatggtctgtgcccattgctcagtggtgcagctctggcttccccagcatgctgaatgtctttaaggtcatcagctcgccccttcccagcctgtggtgtcaaatgtcttgccccttgtcaaatgtgcttggatcgatgatgagtcccctataaaaacattccttggaaaagctgaacaaaatgagtgagaactcataacgtcattctcatcggaactgaggtccagcatgttgcttcctctggggcctgtaggagtgagggacaacttccactgattcccataggttccaccacccagggcatccacagacaaaagtctcgtgtcacaggcacgttaggaacattccctctgtgtgaggtacatgggtgggagagtgatgggggattcggccgctctgtgatggcgtggtggccgtggaagcaggcagaaatgttgcaggcctaggggaagtggaaatgttgccagcacaggggtgtgtgctactggtaagctcccagaaggaagacccggacctcacagtggtcatctcagtgcagaagaccaggtgtctgttttcatgtcgaggagagcccaaggcccagacctcaggcagaccttggtgttgatttttgattagttgagaacaggggagtgccaaggtgttaggggagagtgcagagcaataggtgtcggggcaaacagtgaaagcctcttcagcctaccctgcagcattggtcaccaggagccctcctggaagggatttctttgcctcctgagctgtgagatgcctgtggtgcagtggcagaggcctaggtaggaaggtactccaggggaaaggtggtagagggatcacatggacatgagtgtcattagcaggcttgggctgtcattcaggggtgatgggcttcccatggatttttctggtggaagacaggttggccagcaggggtcttcgaggccaggtcctggggagcacgaggatcgagttggtgcccgtggccctgggtcacttccagtcttcccaggagagtaatgggctcctccattgtgcaaatcttcctataaatggtctcttggcccgccattattgggcggctccacctgctgcagcttgtatgagcaaatactgctctggatcctctttcctgcttggaaagcagcttcagtcctgaaggtccagagtgaatgtgccctgaccctggctctggcccaagtctgtgccgtaggtactcgtcacacttggagctatccatggaggtctgtgtgcattccaggcaacacgggtgcaatcccaggggtgctgccacagagtccttttacttgggatgcctcacacctctgcatgttggcaatatttaagtgttggagtccactacaccctaggggtgatgaactgttttggctcccttaaccggtttgaagtctcagcgcagccaggacagccatgccatgttgaagggcatgcagatggcttaggaatgttggaaaggatgggtggttctgagctcgcagctcactcactagctgcatgcatgtagacccagtggtggtgttcaggtagtgttgactttgaggcattgcggcgggtagtagtgcagtcaagttggctgcataatgggatgttgcctcagaggtcagtacaggatagccctgtgggtgtgtccaatgcaaggaaaatgaaaggcagtgtatcccatccgcctggtccttgggacatcggtaggggggacgtcccattggaaaagcagccattccgtttgtgtgtcgagagggcatagtgcaggcacatggactgagtggaggggaggaaggctgtgtcttgaggtcctttggctagattgggaagaccacctctggccttgacgccaagtttcaggctgatgtgctggccattgcaaaggcgccctccagcacaggttgtgattggttttccaccaggtacgcctcacctgagagggcggctagagacagtgtctgctcaggacatcagatgtcccgtgaggaggagtgtgtactcacaccaggggagttgactggtaggcgagccaccttgggcctatgtccgcatggtctccaggtcaaaattcacatcctactgattgaaggccttggtcttcagctgttgggttggcgtggtgtcaggccaggaggctgcagactatgactgcctgttgcagtgttgggaaacacacatgttaggaaacacatgtgcatgagggagacacacacacacacattcatacacacacacacacacacacagaggcatgccgagccacaggcaaatacatgcagcaatgggcgtatgtgaccacgtgcacttttaggtatccacagagtaacacatgtaagatatattcatggagatggaggtcagtcgtggaagccaaggaataacgggtgtgcaagttgcccaacgggaaagaatgggattgaagtgttgaccagtggacctgagcccatttctcaagcgtttatttgatttctttacacttctcagaggcagttgctgtgggaggtgtggtaactgctggaaggaagatgctcaattcttctgagcaacgaaggccacacggagtcctggattctgtgtggcctggcatccatggcgcactgtgtgctggcaggtggctcaggacggtaagcatttctctgcccagtatgctgaatgagggtgtctttcggatttccaagacccgcaaggagcagtttctcagctaaccactaatggcatggcgagttcctctcctagagtggatagtctgtgctcattgctcagtggcatcgctctagtggggccgaaggtctttaaggtcattggctcacccactgcccagcctgtggtgtcaaatatcctgccccttgccccttcaaatgtgcttggatcgatgatgagtccccaaaaaaaacattccttggaaaagctgaacaaaatgagtgaaaactcataccgtcattctcatcggaactgaggtccagcacgttgccttccccggggactgtaggagtgagggacaacttccactgattcccataggttccaccacccaaggcatccacagccaaagtctcccatcaaatgctcattaggaacattccctttttgtgaggtacacaggtaggagagtcctggggggaacggctgctctgtgatggcctggtggccatggaagcagacagaaatatcgcaggcctagggtagtgtgcgcctgatcttggcttggtgagctcctaggaagggagacgcggacctcgtggcaggcgtctctgagcagaggactgagtccttgttttcttgccggggagagcacaaggcccaggcctcaggcagatgttggtcctgatttttgattagctgaggacaagggagtgccaagggtgatgggggacagtgtataacaaagggtgttgtgacagagagccaaagcctctttggccctccacccagcatccagtcatggaggccccccagcagggatttcttcatcccctgagccgtgagatgcccctggtgctatggtggaagcctggactggaaggtactccacagaagaggtggtagggggcttatgtggacatgtgtgtcatcagcagtcttgggctgttgttcagcgttgatgggctttccatttatttctctagtggatgacaagttggccagcagaggtgtcagagggcaggttccagggaatacaagggtcagacttgtgctcctggcccttggtcacttctcgtcttcctgacagagtagtgggctccactgttgggcacatcttcctggaagtcgtctcttggcccgccattgccgagcggccacacctgctgcagctcgtgtgagcaaatatggctctggatcctctttcctgctttgaaagcagcttccatcctgaaggcgtccagagggtatgtgtcctggccctggccaggaactctgctgtgggcattggtcacacgtggctatccatggagatccgggtgcattccaggcaacattctaggggcctgccatggagagttcgttgacttgggatgcccctgcacctcccatgttggtgatgttccagtgttgcattctgctacaccctaagggtgatgaagcatttcagctcccttaaacagtttgatgtcacagtgcagccaggacagccatatcatgttgaggggcccacgactgcattaggaatgttggaagggattggtggttctgcagatcgcagctcattagtagctgtttacttgtagacctggtgatggtgctgaggcagtgttgacttgcaggagttgggatgggtggtaatgcagtcaagttggctgcatgatgggatgttgcctcagagttctgtgcagagaagccctgtgggtgtaaccagtgcaaggaccatggaaggcagtgtgtcctgtcaacctggtccttggggaagggacgtcctgttggaaaacagccattcccttcggttgtcctgaaggtgcagtgcgggcatgtggactgagtggaggaagcccgtgtcttgagatcctttggctaggttgggaagattgcctctggcttgatgccattttcagacctatgggttggtaattgtgaaggcgccctcacgtgctggttgtggttggttttccgccaagtgagcctcacctgggagtgcagccagagacagtgtcaggtcacaacatcagatgccccatgaggaggagcatgtgctcactccaggggtggtggctgttaggtgagggacctcaggcctatgtcctcctggcctgattttacatcctactgattgaagaccttggtcttgagccttcgggttgcaggggcttcaggtctggaggctgcagactatggcctcctgttgcggtgttgggaaacacatgtgcatgagggaaacacacatacactatcacacacacaaacaggcgctcacagccacaggcaaatatacgtagcaccacgtgcgtgtggtcgttccggccacacgtgcttcctaggtgtctagaaagtgacacagtcagatacatttataaagatggaggtccataatggaggccaaggagaagcgggcatgtgtgttgctctgtggaagagagtggcgttgaagtgaccagtgaacctgggcccatttctcaagcatgcatttgatttctttacacttctcaggggcagttatcatgggacacccgccatatgctggcaaggaagatggtcagttcttctgagccacaaaggcccccaacatcctggagttggtgttgcctagcatccacggtgcgccccctgctggtggatggctcaggatggtaagcattcctccgccgcacatgctgagtgggggtgggatttccaagacctgcaaggagctgtttctcagcaggccactgatggcatggcgagttccactcctaaagtgaacggtctgtgcccattgttcagtggtgcagctctggcttccccagcgtgcggagggtttttaaggtcatcggcttgcccactgcccagcctgtggtgtcaaatatcctgccccttcaaatgtgcttggatcgatgatgagtcccccataaaaacattccttggaaaagctgaacaaaatgagtgagaactcataccgtcgttctcatcggaactgaggtccagcacattgcctcccccggggactgtaggagcgagggacaacttccactggttcccagaggttctaccactcagggcgtccatggatgaaagtctcacatcacaggcacaatagaaatattccctctgtgtgaggtatacaagtaggagagtcatggggggattggctgctctgtgatgtcgtggcaactgtagaagtgggtggaaatgcagacctaggggagtgtgcggctggccttggcttggtgagctgccaggaagggagaccctgacctcctgatgggcctctctatgtggcggaccaggtcttttttttatgccaaggagagcacaaggcccagacctcagacagaccttggtcttgattttcagttatctgaggagaggggagtgccaaagtgatgggggacagtggagagcaatgggtgttgtggcagacagccaaagcctctttggccctccccccagtgttggttacaggggcccctggcagcaatttctttggctcctgagccatgagttatccatggtgtggtggctcagcctgggcaggacagtaccccagagaaaaggtggtagagggctcacatggacacgcgtgtcatcagtggtcttgggctgtcatttggcagtgatgggctttccatggatttctattgtggatgacaggttagccagtggggccttcaagggcagatccaaggagcatgagtgttgggctgtagcccgtggccctcggtcacttctggtcttcccggcagaatagtgggctccaccgttgtgcacatcttcctggaaatggtctcttggccctccattgctgagcagccccacatgctgcagctcttgtgagcaaataactgctttggatcttccgtcctgctttgaaagtggcttccatcctgaagactttcagagggaatgtgccctggccctggccctggctcggaactctcctgtgggattcggtcacacttggagctgtccatgggggtctgtgtgcagtccagacaatgcatatttaatcctaggtgccttccatagagagtcccttgatttgagttgcctctactcctctgcatgttggtgatactcaagtgttggatttagctacgccctaggtgtgatgaactgtttcaaccccgttagtctcagcgtagccaggatagtcatgccatgttgaagggcatgcagatggcttaggaaagttggaaaggattggtcattctgcggctcgtggctcacttagtagccatgtgcatgtagacctggtggtggttgtcagatgtcgttgagcaggtgttggggaggatggtcctgcatccaagttggctgcgtggtgggatgttgcgtcggaggtcggtgcaaggaaggcctttgagtgtgatcgatgcaaggatgatggaaggcactgtgtcctgtctgcctggtgtttggggcgttaggcagggatgtcccatgggaaaagcagccattccctttgggtgtcctgaggacatggtgcaggtacatggactgagtggaggagaggaagcccgtgtcttgaggtcatttgcctaggttgggcagactgcctgtggccttgatgctgagtttcagagtgacgtgctggccgttgcaaaggcgccctccagtgctggttgtgtttggttttgtgccaggtgtgcctttcctgggagtgctgccagagacagtgtctggtcacgacatcagatgccccgtgaggaggagcttatgctcaggctagggatggtggctgttatgtgagggcccttgggcctatgtctgcatggcctcgaggtcagagtttacatcctgctgattgaaggccttggtcttgaattgttgggttggtaggggctcaggtctggaggccgcagactatgactgcatgttgccatgttgggaaactcgtgttgggaaacacatgtgcatgagggagatacacacacacacacacacacacacacacagccactcagcaatgtgtgtgtgcgcggtcggtctggcgccacacacagctccaagctgtttgcagagtgccactggtaaggtacattcatggaaacagaggtcactcatggaggccaacagaagcaaggcgtgcaagttgccacgcatgaaagaatggcactgaagtagtgaccagtggacctgggcctgtttctcaagcgtacatttgatttctttatacttctcaggggcagttgccgtgggaggcccgctgcctgctggaaggaagatggtcagttcttctgaaccacaaaggccctgcagagtcctggagtctgtgtggcctggcttccagggttcacctcatgctggtggattgctcaggatggtaagcattcctctgccccatgtgctgagtgacggtgtcttttggatttccaagacccataatgagctgtttctcatgaggccactaatggcatggtgagttgcattccttgagcaaatggtctctgccttttgctcagtgccatggttctatcttccccagggtgccgaaggtctttaaggtcgtcagctcacctactgcccagcctgtggtgtcaaatgtcctgcctcttcaaatgtgtttggatcgatgatgagtccccccaaaaaaacattccttggaaaagctgaacaaaatgagtgaaaactcataccgtcgttctcagcggaactgaggtccagcgcgttgcctccagcagggactgttggagtgagggagagcttccactagtccctataggttccaccacccagggcatccgcaggtaaatgtctgccatcacacgcacattaggaacattccctttgcgtgagatacactgttaggagagtcacggagggattggatgctgtgtgatggcgtggcagctgtggaagtggacggaaaaatctcaggcctagaggagtgcgtggcactgatgagctcccaggaagggagacccggaccttgtgtcaagcttcctcgcacacaggaccgggtcctggttcccctactacagagagtatgaggtcccagcctcaggcagaccttggtcttgattttcagttagctgaggacaggggagtgccaagggtgatggggaagagtgcagagcaatgggtgttgtagcagatggccaaagcctcttcggcccttcccccagcgttggtcccagggtcaccccagcatggatttctttgcctcctgaaccgtgagatgcccatggtgtggtggtggagacctgggtaggacatattctctggtattccagagaaaaggtggtagggggctcacatggacaggtgtgccatcagtggtcttgggctctcatttggtggtgctgggctttccgtgtattcctctgatggatgacaggtcgggcagcaggggtcttcaagggcagttcccaggcgtgtgagggttgggctgctgcctgtggccctgggtcactccgatcttcctggcagagtaatgggctccaccgttgtgtacatcttcctgtaaatagtctcttggcccgccattgccaggcggccccacctgctgcagcttgtgtgagcaaatactgctcttgatcctttttcttgctttgaaagcagcatccgtcccaaaggcatccagagggaatgtgccctggcccaggcccaggaccctcccgtgggttccaatcatgcatggggctgtctgtggaggtccgtgtccattccgggcaatgcgtgtgcaatcccaggggtgttgccacggaaagtctcttgacttgggatgcctccacgcctctgcatgttggcaatgttccagtgttggattccgctactccctatgcatgatgaagcattttagctcccttagccagtttaaattcacagtgcagccaggacagccgtgccactttcaagggcacttggttggcttaggaaagttggaaaggattggtggttctacagttctcagttcacttagtagctgcatgcatgtagacctggtggtgctgatgcagtgttgacttgccagtgttggggtgggtagtagtgcagtcagattggctgcatgaggggttattgcttctgaggtcggtgcagggatgccctgtgggtgtgtccaattgaagaacgatgacaggcagtgtgtcctgtcaacctggtccttgggaattcaggtagggacgtcctgttggaaaagcagccattctctttgggtgtcctgagggaacggtgcgggcacatggactgagtggaggggaggaggcatgtatcttgaggtccttttgctaggttgctagtcctacctctggccttgatgccaagtttcagactgacatgctggactttgcaaaggcgccctctggagctggttgtggttggttttccgccaggtgcacctcacctaagagggtggccagagacagtgtcttgtcatgacatcagaagccccatgaggaagaggaggagcctgtgctcctgccagaggtggtggctgttaggtaagagacctgtgacctgtttccacatggcccggaggtcaaagttcacatccagtgatcgaaggccagggtcttgagccatcggattgctggggggatcaggtctggaggctgcaaactagaactgcccattgtggtgttgggacccacatgtgcattagggagacaaacatgcccatttaaactaacattctcacacatgcacacacccacacccacccatacacacacactctcatacactcacactcaaactcacactctctctttcacacacacacacacacacacacaggcacagacagccataggctaatagatgcagcgatgtgcacatggtgtggttctggccacatatgcttttaggtgtccacagagtgacgcaggtaaggtatattcatggagctggaggtcagtcatggaggccaaggagaagcaggtgtgtgagttgccctgtgggaaagaatggtgttgaagtgtccagtgaacctgggcctgtttctcaagcatgcatttgatttctttacacttctcagggacagttgccgtgggaggtccgctgcctgctgtcaaggaagatggtcgatgcttctgagaaacaggccctgcgggttcctggatttggtgtggcctggcatccacggtgcaccccgtgctggcgggtggcccaggacggtaagcatttttctgccccgtgtgctgagtgatggtgcctttagaatttctgagacctgtgagcaacagtttcttggcaggccattaatggcatggcgagttccattcccaaagtggatggtctgtgccggttgttcagtggcgcggctctggcttccctagggtgccaaagttctttaacgtcatcggcttgcccactgtctggcctgtgggtgtcaaatgtcccacctcttcaaatgtgcttggatcgatgatgagtcccccataaaaacattccttggaaaagctgaacaaaatgagtgagaactcataccgtcgttctcatcagaactgaggtccagcacgttgcctcccgtggggactgtaggagcgagggacaacttccactggttcccataggttccaccaccgaggacatccacaggccaaagtctcccatgaaatactcgttaggaacattccctctgtgtgaggtacatgggtgggagatttgtgggggcactggctgctctgtgatggcgtggcggccatggaagaggggagaaatgtcgtgggcctaggggagtgtgtggctggtctcagcttggtgagctttcaggaagggaggcctggacctcatgggtggcatctccatgcagaggacaaggtctcacttttgctaccaaggagagcacaaggtccaggcctcaggcagaccttgttcttgatttctggttagctgaggacagggaagtgccaagggtgatgagggagagtgtggagcaatgggtgccacggcagatggccaatggctcttcagccctcctgccaatgttggtcacagtgtccccccagcacggatttctttgcctcccgaaatgtaagatgcctgtggtttggtggtgaaggtgtaggcagggtggtattccagagaaaaggtgctagagggctctcgtggacatgagtgtgcattgggctttaatttggcagtgataggctttccatggatttctctggtggatgacaggtcagccagggtgggtctttgagggcatgtctctgggtgagtgagtgtgaggatggtgtccatggccctgggtcacttctgttgttcccagcagagtagggggctctactgttgtgcacatcttcctggaaatggtctcttggccttcgttgtcgggtggccccacctgctgctgctctcgtgagcaaatactgctctgtatcattcccgctttccatcccaaaagtgtccagagcgaatgtgccctgtccctggcctgggactctcctttgggctccagtcatgcatgaggctacccgtggagatctatgtgcattctgagcagtgtgtttgcaatcccaggggcattgccacagagagtcttgacttggcatgtctccatgtgactgtgtgctggcgatgttccagtgttggactccaaaagtccctaggcgtgataaagcatttcagctcccttagctggtttgaagtcacagagcaggcaggacagccatgccactttcaagggcatacagttggcacagaaaaattggaaaggattggtggtcgtacatcttgcagctcacttagtagctgcatgcatgtagaccgggtggtgttgatgcagtgttgacttgctggcattggggtgggtggtagcatggtcaagctggctgagtgatgggatattgtctcagaggttggtgcagggaaactctgtgggtgtgtctaatgcaaggataatgacaatgtcctgtctgcctggtctttggggggtcaggtggagatgtccttttggaaaggcagccattctctttgagtgtccagagggcatggtgcaggcacatggattgagtggagggaaggaagcgtgtgtcttgaggtcctttggctaggttgggaagactacctgtggccctgatgctgtttcagagtgatgtgctggccattgcaaaggcgccctccagtgctggttgtggttggttttccatcaggtgcacctcacctggtaaaggggccagagacagtgtctggtcatgacatcagatgctctgtgaggaggagcatgtgctcgtgccaggggtgctggctgttaggcaagggaccttggacctctttcctcatggccttgaggtcaaagttcacatcctattgattgaaggctggggtcttgagtctttggtttagtggggttggttccggtctggaggctgcagactatgactgcccgctggggtgttgggaaacacatgtgcattagggggacacacatccacacagagacacactcatgcacacatgtgtgcacagccacagacaaatagatgcagcaatgggtgtgtgcaatcgttaggccacacacacttataggtgtccatggagtgacacaggtaaggtatgaatgggtctttgaaggcatgtttctgggcgagtgagtgtcgggatggtgtccatggccctgggtcacttctggtcctcccagcagagtagtggtatgaatatggagatggaggtcagtcatagggtccaaggagaagcaggggtacgagttgccccgtgggaaagaatgacattgacgtggtgaccagtggacgtgggcctatttctcaagcgtgcatttgatttctttacacttttcaggggcagttgccttgagaggcccaccgcctgctggcatgacagatggtcagttcttccgagcagtggaatctccatggagtcgtggagtcggtgtggcctcgcatccacagtgcaccctgtgctggtggatggctcaggacagtaagcattcctctgccccgcatgatgagtgagggtgtctttagaatttctgagtcccacaaggaagtttttcagctggccattaagggcattgtcgaggcctttaaggtcatcagctcgcacactgcccagcctgcagtgtcaaatgtcctgcctctttgaatgtggttggatcgatgatgagtcctccaaaaaaaacattccttggaaaagctgaacaaaatgagtgaaaactcataccgtcattctcatcggaactgaggtccagcacattgcttcctctggggcctttactagtgagggacaacttccactagtccctataggttctaacacccatggcgttcacaggtgaaggtctcctgtcatattacaaacattccccccactcccctcccaaaaaaaggaacatttcctctgtgtcaggtacacaggtcagagagtcatagggtgactggctgctctgtgatggcatagtggccgtggaagtggatggaaatgtcgcaggcttaggggagtgtggggctggcctcggcttggtgagctcccaggaagggggacctggaaatcgctgcgggcatccttgcatagaggaccaggtacgtgttccagttctgctttcaaggagagcatgaggcccaggcctcagacagtccttggtcttgatctttggttagctgaggacaggggagtgccaagggtgataggggagagcgcacagcaatggatgttgtggcagacagctaaagcctttctgtccctcctttcacggtcagtcccagggggcccccagcacagacttttttcacctctcgagctgtgagattcctgtggtgttgtggccaagcctgggcaggaaggtaccccagagaaaaggttgtagagggctcacgtggacatgcatgccatcagtggtcttgggctgtcatttggtggtgatgggctttccagggatttctctggtggatgacaggttggccattgggggtcttcaagggcaggtcctagggagcatgagggtcgggctgatgcctgtggtcctgggtcactccattcttcctggcagagtagtagaagtgtccatcttcctggaaatggtctcttggcccgccattgccaggcggccccacctgctgcagctcgtgtgagcaaatactgctctggatcccatttcccgctttgaaagcagcttccatcccaaaggcgtccagagggaatgtgccctggccctggccctggcctgggactctccgatggggtccagtcacacttggcgtattcatggaggtccttgtgcattccaggcaacacatgtgcaataccaggggcactgccgtggagagtctcttgatttgggatgcctcctcgcctttgtgtgttggcgatgttccagtattggattctgctacatcctcagggcaatgaagcgtttcagctcacttagccggtttgacatcatagtgcagccaggacagccgtgccacattggcatggcacatagttgacttaggacagtcggaaagggttggtggttctatgtctcgcagctcacttcatagctgtttgcatgtaaacctggtgatggtgttgagatggtgttgacttgctgacgttggggtggttggtagtgcagttaagttggctgcatgatgggatgttgcctcagatgtcggtgcagcgaagccctgtaggtgtgtccaatgcaaggaaaatgaaaggtggtgtgtcctgtccaccttgtctttaggggttcaggcaggaatgtcctgttggaaaactagccattccctttgtgtgtcctgaaggcatggtgcgggcatgtgaactgattggaggaaggaagtgtgtgtcttgaggtcctttggctgggttcagaagactgtctctggccttgatgccgtgtgccgtgtttaagaccaacgtggtggccattgcaaaggtgccttccagtgcaagttttggttggtttggtgtcaggtgtgccttacctgggagagcggcgagagacagtgtctggtcacgacattatatgccccgtaaggaggactgtgtgcttgcaccgccaggggtgctggctgttagtcgagggacatcaggccaatgtctgtctgacccctaggtcaaaattcgcatcctactgattgaaggccttgggtctcgagccttttggttgcaggtgtggggatggtttccaggtctggaggctgccaactatgacaacccgttgtgctgttgggaaacatctgtgtgggggagacacatacacatagacacactcactctgacatacacacctacacatgcacaggcgtgcacagccacaggcagatagatgcagcaatgggtgtgtgctattgttgtggtcacatgtgcttcctaggtgtccacagagtgacatgggtcaggtatattcatgaagatggaggtctgtcatggagcccaaggagaagccggtgtgcaagtttccctgtgggaaagaatgggattgaagtggtgaccagtggacttgggcccgtttctcaagcatgcatttgatttctttacacttctcagcagcagttgtcatgagaggtctgccgcttgctggcaaggaagatggtcaattcttctgaccaacagaggctgccttgagtcctgatttggtgtggcctggcatctatggtgcacccaatgctggtgagtggctcagggtggtaagcattcctctgccctgtgtgcagaggtgtcttttgaattttgagacctgcaaagagctgtttctcagcaggccactaatggcatggcgagttccactcccagagctgattgtctgtgttcattgctcagtggtgtggctctgggttccccccaggatgctgaaggtgtttaaggtcatcagctctcccactgcccagcctgtggtgtcaaatgttctgcctcttcgaacgtgcttggatcgatgatgagtcccccataaaaacattccttggaaaagctgaacaaaatgagtgagaactcataccgtcgttctcatcagaactgaggtccagcacgttgcctcctctggggactgtaggagcgagggacaacttccactggttcccatgggttccaccacccagggcatttacagatgaaaatctcctatcacatgcatgtgaggaacatttcctctgtatgacatagacggatgggacagttgtggagggattggccactctgtgatgttgtggcagccacggaagcaggtggaagtgttttgacctagggttgtgtatggctggtctcggcttggtgagctcccaggaagggagacccgggcctcgcagcaggtgtctttatgtagaggaccaggtcacagttcccctgccaaggagagcatgaggctcaggcctcagatagaccttggtcttcattttccactagctgataatgggagttccaaggtgatggaggagagcacagagcaatgggtgtcaccgcagatggctaaagcctctttggccctccttccagcatcagtcacaggtgccccctggcatggatttctttgcatccctagccatgagatgaccatggtgcagtgaccaaggcttggccaggatggtaccccagagaaaaggtggtgaagggctcatgtggacatgtgtgtcatcagctgcattgggctgtcacttggtggtgatgggcttcccatggatttctctggtggatgacaggtcagccagggcgggtctttgagggcatgtctctgggcaagtgagtgtcgggatggtgtctgtggccctgggtcacttccggtcttctcagcagagtagtgggctccaccgttgtgcacacctttctggaaatggtctcttggcatgcattgttgggtggccttacctgctgcaactcatgtgagcaaataactgctctggatcctctttcccgcttggaaagcaatttccattctgaaggcatccagagggaatgtgccctggccctggcctgggattctccagtgggttccagtcatgcatggggctatccacggaggtctgtgtgcattccaggcaatgcgtatgcagtcccagcggcattgccacagagagtctctcgacttgggatgactctgcgtgttgacagtgttccagtgttggattccgctatgccctaggcgtggtgaagcatttcagctcccttaactggtttgaagtctcagcacggccaggacaggcatgtcacgctgaagggcacacagttggcttaggaaagctgaaaaggttggtagttctacggcttgcagttcacttagcagaaacgtgcttgtggaccccgtggtgttgagacagtgttgacttataggcactgtggtatgtagtagtgaggtcaagttggctgtgtgataggatgttgcctcagaggtcggtgcagggaagccctgtagatgtgtccagtgcaagaatgatgacaggcggtgtgtcctgtcaaccttgtccttagggggtcaagtggagatgtcctcttggaatagcagccattagctaggatgtcctgagggcacggtgtgggcatgtggactgagtggaggggaggaagcccgtgtcttgagattgtttggctaggttgggaagactgcctctggccttgacactgagtttcaaactgaggtgctggactttgcgatggtgccctccagtgctggttgtagttggttttccaccacatgtgcctcacctgagagggcagccagagagagtgtctggtcacaacatcagatgccctgtgaggaggagtgtgtgctcatgccaggcttggtggctgttaggcaagggacctcgggcccatgtccgcatggcctcaaggtcaaagttcacatcctactgattgaaggcctgggtcttgagcttttgggttgtgaggaggttcaggtctagaggctgcagactatgaccaccccttgtggtgttgggaaacatatgtgcatgagggagacacacatacacacacacacagacacactctctctctcacacacacacacacacacacacacaggcgtgcatagccacaggcaaatagattcagcaatgggcacatgctgtcgtttcggtcacacacgcttcctaggtctccacagagtgacacgggtcaggtatattcatggtaatggaagtcaatcatggaggccaaggaaaagtaggtgtgtgagttgccctgtaagcaagaatggcgttgaagaggtgaccagtggaccttggtctgtttcttaagcatgcatgtgatttctttacacttctaaggggcagttgccgtgggaggcctgccgtctgctgaaaggaagatggttgatgcttctgagcaatgaaggccccatggagtcctggattcggtgtggccttgcatccgtggtgcaccccgtgctggtggatggctcaggacggtaagcattcctctgccccgcatgatgactgagggtgtctttaggatttctgagacccacaaggagcagttcttcagcaggccattaagggcatggctgtggtctttaaagtcattggctcacccactgcccagcctgtggtgtcaaatgtcctgcctcttcaaatgtgcttggatcgatgatgagtcctccaaaaaaacattccttggaaaagctgaacaaaatgagtgagaactcataccgtcgttctcatcggaactgaggtccagcacatttgcctctgccggggactgtaggattgagggacaacttccactagttcccataggttccacctcccagggcatccacaggccaaagtctcccatcacacacaggttaggaacatttcctctgtgcgatgtagacgggtaagagagtcatgggcaaattgtctgctttgttatggtgtggcagccatggaagagtacagaaattttgcaggcctcaaggagtgtgtggctggcctcagcttggtgagctcccaggaagggagacccagatctcgcggcagatgtcactgcacacaggactgggtccgatttttttgccaaggagagcatgaggtgtgggcctcaggcagatctttgtcttgatttctggttacctgaggacaagggagtgccaagttgatggggaagagcaatgggtgtcccagcagatatccaaaggctctttggctctccttccagggttggtcacagggcctccctggcagggatttcttggcctcctgagctgtgagctgctcgtagtgcaatggcagaggcctgggcaggaaagtattccagagaaaaggtggtagagggctcacgtggacatgtgtgtcatcagtggtctggggctgtcatttggcagtgatgggcttcacatggatttctctggcagatgacagctcagccagcaggggtcattgagggcaggtcacagtgaacatgagggtcaggctggcacccacagcccttggtcacttctggtcttcacggcagagtagtgggctccactgttgtgcacatcttcctggaaatggtctcttggcccgccgttgccggatggccccacctgctgcagctcgtttgagcaaatagtgctctggatccactttcccacttggaaagcagcttccatcccgaaggcatccagagggaatgtgccttggctctggctctgccctgggcctctcccatgggctctagtcacacttggggctattcatgaaggtctgtgtgtattccagattccaggcaacatatgtgcaatcccaatggcattgccacagagaatcttttgacttgggatgcctccgtgccactgtatgatggcgatattcaagtgctggattctgctccatcctggggtgatgaagcgtttcagttcccttagccagtttgaagtcacagtgcagccaggacagccatgccacattgacgggcttgtggttggcttaggaaagttggaaaggattggtggttctacagctagcagctcacttagtagccacatgtatctacacctggtgctggtgttgaggtggtgttgacttgcaggcattgttgtgggtgggaatgcggtcaagctgactgcacgatgggacattgcctctgaggtcagtgcagggaagccctgtgaggtgaccagtgcaaggacaatgttaggtggtgtgtcttgtccactcggcttttggggcatcaggcgtggacgtcctgttggagaagcagccattctcttcaggcatcctgagggcacgtgtgcgtacgtggactgagtggagtggaggaagctgtttcttgaggtcgtttggctaggttgggaagaccacctctggctttgacgtcatgtatcagtgcaacattctgagcattgggcaggtgccttccagcacaggttttggttggttttccgccagatgtgccttacctgggagtgcagcaagagacagtgtctggtcccgacatcagaggccctgtgaggagtagcctgtattcgcgccaggggtgtggtggctgttacacgagggacatcaggcctatttccacgtggccttgagatcagagtgcacatcctactgattgaaggtcttgaacctttgatttgttggggggatcaggtctggaggctgcagactataaccgcccattgcagtgggaatctcacacacacacacacacacacacacacacacacgtgtgcacagccacaggcaaatactcgcagcaatgggcacatgaggttgttccaggcacacacacttcctatgtgtccacagagtgacagaggtaagatacattcatggagatggagatcaatcatggaggccaaggagaagcaggcatgcaagttgccccacaggtaagaatgggtttgaagtgaccagtggacctgggcccatttctcaagcatgcatttggtttctttacacttctcaggggcagttgccatgggaggcgcaggcctgctggaaggaagatggtcgattctcccaagcaacaaaggccacgtagagtcctggtttcagtgtggcctggtatccacagtgcaccccgtgctggtgggtggctcaggacggtaagcattcctctgcccttcgtgctgagtgagggtgtctttgggattcccaagacccacaatgaacagtttttcagtaggccactaatggcatgctgagttcctctcctagagtggatggtctgtaccttttgctcagtggcacagctctgggttccccagggtgccgaacatgtttaaggtcatcggctcacccactgcccagcctatgatgtcaaacatcctgcgtctttgaatgtgcttggatcgatgatgagtcccccataaaaacattccttggaaaagctgaacaaaatgagtgagaactcataccgtcgttctcatcggaactgaggtccagcacattgcctccactttggcttattgtggttcacgggtaactgtcatattacatggtacttcactacccaggcactggcattcaatttttgtggtcgttttgaccatagtaaaattctttatcataaatgtatttgagaatcatacttgggtagcccatgaatttttttagtgttactcttcttggtgtcaagttggtttcacccttaatgctaggttttggatttttgttgcatgattgatttttagccaggttctggtcaccaatcacagcctttcaccaacattcatggagaaagtttccttgttttttttatatgttgaggaagtacatatttcctgaatgtttttgcttttgttccaatgttgggctgactggcatgtcatctcttatcttatcttgaactgagtagtggtacaagtttttggctttcagcatccagggcaccaagtcttttgtacacaaattgcaagtattgaagccatggtgttgattgggatgctctacgcccatactctttagtggcatgacgccctcccagggtacccggaatccacatgtgcaactctgtatatgtgtttctgtgaacacagatatgtgaagccatagataagcagatttcatatgtaccacaggagtctatatgacatagccttcctgacctatgtacctgtctgtctttctgaagcacactcatttcctctgcaccttcctggtgtcattggcatggaaggaaggcccttgtccaagaaggatggtcttcgtcttgtgtgatctttgagatgccatgaggcccctggatacaaatggtgtgggctcctttggaggcttttggatttctcctgaatgtaagtgatttcttctgaaagcattctgattttcctcacttgcagggacaaagactatgtgtaggttgatgatgacttacatatatacgttttttttttttttttggaaaggtgaacaaaatgagtgaaaactcagtaccatcatcctcatctaactgaggtccagcacgcttctccatcagggcctagatttagggggccaacatctgtttgttatcatggtgtgcaccaaggcttaggatgtagttgtctttcagtgaaactgagtagctgagtattttgtactcccctggctgagagatacgtttgttgaacgacttacctgtgagaaggtggggtagcatcctgccagtgtgcaggagaaggtaaacctgcaggtgccacaggaaggcggtatccagttgcccacctctgcatggctgggtctgtccttgattcatacctcttgggttcgtcaccccccagaagaagacaatttattccacatgaggagacagcacggtgccattcctgagcacttcttcaactgtctttcatctgtggccggggacatgggacttcttatggtgtttgggtagcatcaagggctggccatcttgaagccagtggtgatgctgatttgctctctggaaaggagcctggagaagctctctacagtgaacttgtacatctataagtagaattccaaatttcatggcccaagaagggtagtggctgtgggaaggggagaggtctgtgtgtgcctttacctggcatcattccatgtgggtcgtggagtgatgactgtgaggctctttaagacattgcagggtgcccaaggtccatttcgtgatatcctcaggatggtttgcttgggagagcctgatgtcatttgcctctgaaccgctcagacatcttgatgcagttggggtttataagagtgtgtcattccccacatcgtggtgacttctacttggaaatgtgacctgcgaaggtctccttgcttatatacctcagcgtctcctgatattagggtattttcaaattcctcctaattcttcacagcagtcttctttgtgaaatagtcgttgtgtggtaggacagggctaccatccacaggccaatgatggataggtgttggactctgatgttatgttcacaggcaagtgccttaagatcttgttttcttagctgcagcaccttagaaatcttgtaggattcagaatgcctggtgctcttctgggtccctgatctgtacctgtgtagtgcacatggaggttgatttgtgatgtttctggatgggaagagtgtgaaggacccaaggggtaaaaatgcctcaaggccaaaggaaagttaacctttgcataggaagaggtttcccctccaaactctcctcactgaagtatcaccatagcctttgtcttctctgatggccaggagaagggtttttgagttggaggtgttataagagtggtgttgagagtgttcttcatgcttagtgctctctagttgatggtgccttcaaaattcatgcctgcctcctaccttcatgtttgggcaaacccatgcatgtgtgcagaaagaaggggagcccatgggaggtagatacagattactccacaacaggacaaatgacatgacccttgccacctatgcacctcactgcctttctcaagcacactgttttgcttctgcacttcttaggtggcgttggtatggaaggaaggccagtgaccgcaagggatgactttgatcttgggagatttttggagatggcaaagtgcttctaaacatgtttggcatggtctccttcaggctggtggatacctcaggatggtaagtattggttttccaaaggcacctaatgttccatgtttgcaggtatgaggactgtgcatggatcaatgatgacttccatacgtgggttccttggaaagttgaacaaaatgagtgaaaactttatactgtcatcctcttcaaactgaggtccagcacactgcttcaacaggggctagagatggaggtctacctctcattcattgacgtgggttgcaccaaggggtctgtccaggcttaggatggggttctcttttggcaaggggtagccccaggggagtgggagctcccatgcacaggagattcctggtgtgaaggacatctcttagtgaggccagggtagcacacacaccatcttcaagactaggtgaatgtgcaggtgacacaaaggacttaggctctgtgtcccccagtttgttcttgagtcttagttcttggttctctcatcatcgggaggaaggcaggtccttctcgttgggaagagaggacaagcctacacttttgcctcatttttggctcatttttatccttgtgtatgtacatagatttctggtcacctgcatgcttcacatccaggccagagtgcctctgttgtaccctctgtgttatgaagacatacagttggcctcctgccctaagctggggctgataggcaacgagtctctggcttatctcaaacctggtgtaggtcaaaggcttcctcgttaggggtgcaggtccccgaggcttttatgatcaactttgcaggtgtgcacgggtgtttaaagggatgctcaacatcagttctctctagtgggattatgtactccatgggctcccaggatccagacgtgcatccctgtgtctatgcagttctgcgtccataaacaggtgaagccagagatgggcagattgcagatgtactgcagggggccagatggcatggccctcataacctctgcacatgtctgcctttctcaaacatgcccatgtttcatctgtacctcccaggtggcgttggcatggaaggaaggactgtgtctgtgagggatgatcatcctctcatgtgatccttggagatgccaggaagccccttgacacatgtggcatgggctccttcagaggcttttggatccgtcgtgaatgtaagcaagcccttcccaaagccctgattttcctcatttgcagaaacaaagattgtgcctggatcaatgatgacttccatatatacattccttggaaagctgaataaaatgaatgaaaactctataccatcatcctcattgaactgaggtcccagcatgctgctacattggagggcaaggagagggggccaacatctgtttgttgacatggtctacaccttggcttaggatgtggtcctctttgggcaaatgcaagcgtctgggctttttggacttctgtagctgagagacagcttggttgaaggaatttcctctgagaaggtggggtaagcacactgccagcctgcagaacttgaagctgcagatggcacaggaagcagtagccagtagtctctttgtgcatgactgtgtgtgtccttgattcatagctttttggtttgtcgcctccccgcttgcacaggaataccattgctttcctttggggagagagcatgtcattcctggacacttgttcggcttactttcattctcagtcgaggatgtgggagttcccatggtacttgggtagcatcaggggcaggcagccatgaggtgggtggtgagctgatttgctttctgcagaggagcccagggagggtatccacattgaactcgtatgtccataggaggaaacccaagtcctttggtccctgcagtgtactggtggtgggaaggggagagggctgtgcatgcatgtaccaagcgacattccatgtgggtcgtggagcaatgactatgagcctcttttgggagttgtagggtgcccatgctccatttcatgatgaccttggggtgctgggatgggaatgagattgcaagtccctgtgttcctgccacttcgcagactgacttggtttgagagatctgtgttcaggaacccctgtgggatgcttgtctgtgttaggcatttgagcagatattggcccagggtttctacccttccatggttgtacatactgctggaagggcttgttgctccctctgtattgatgaggggaagttttgcccaggagagcctgatgccatttgcttctgaactgctcaggcacttcaatgcagttgaggttaagagtgtgtcacttcccatgtcgtggtagcatctactcagaaaagtgacccgtcaaggtctctgcacttaaattctccattatcttatgatgttaggttattttcaaattcctcctaattcttcacaacagtcctctttgtgaaacagtcatgaagttgtatgagggctgtcatccacaggccagtgatggagagttttgtactctgtggccatgttcacaggcaagtggcttaagacgtatcgtgttctcagggacagcaccatagaagccctgtaggattcagcatgtctgatgcttttctggttccctgagctgcacctgtgaggaaggccagaggtggaggttgatgtgtgattgaatgtgtttctcaatgcaaagtgtgtggaaggagcttcaaggccgaaggaaagttgttctttgtgctggaacactttttccctgcagctctccccattgaaatatcctcatggctgttgtcttctctgatggccaagagaatggcttttgagtcaggggtggtgaaagtgtggtattgagagaattcttcgcgcttagtgttctctagtttgatggtgcccttgaaatgcatgcctgccttataccttcatgcctgggtatatctgtgcataagtccccaaagagaggtcacccatgggaggtagatatagaatacagcatggcaggaggaatggcatggcccttgcaaactgtgtacctgcctgcctttctcaagcacacctgtttttcctctgcacttcccaggtggcatgggcatgcaaagaaagacagaggctgcaagggataaacttcatcttgggagatccctggagatggcagggaacccatggacacatgtggcatgggctcctttgggtgccggtggatcccttcatacggtatgtgttcatttctcaaaagaccctaatgttcttcctttacaggaatgaatactgtgcatggaccaatgatgacttccatacatgcattccttggaaagctgaacaaaatgagtgggaactctgtactatcatcttagttgaactgaggtccaccgggggctatagagggacaactgtcattttttttgatgcccgttgcatgaagcattcttccaggcttaggaagggattccgtttgggtgaaggagagtcacaggggagttgaggctatgtgcacaggacttctgtctacaaggctggggtagcacacatgcagtccgtgggactaggtgaatgtgcaggttgctcagggagagttaacctgtagcctgcctctgggtggccaagattgtccttgactcctggctctgggttcccacaacccctggaggaagacaagtaattgtgcttgggaagagagaacaaggccatacttttgcctttctttttttcattcttagtttgagaacagtggagttccaatcacctggcatagctttcatgttgtgttccatgcattgtgagtacatgcatatggcaggaacacacaggttcccactgcaagctgagcctgataggcaaggagtctctagcttaaccccagcccagtgtacgtcaatggcttcctcattaaaattgcatggccctgtagcttttgtgagtgacattataggtatcgatgtaagggtgttgagagggatgctcaatgtcagtgctctttagtgtgctgatgcactactacaagggcacctgagcccttgtccatgcatttctgtgtccaaaatcaggtaaagccagagttgggtatcaaccagatacactgcaggggatcagaggacatggcctttgtgtactgcacatctgtcagattttctcaagcacacccgtgtttcctcttcacctcccacgtggaagtgatgaattggccaggaccatgttggtgagggacaatcatcatctcatgttaacctcagagaagccaggaagctcctggacacacatggtgtaggcttccttggaggctgttggatctctcctgaatgtaagcaattccttcccagtgcaccctgattttcctcatttgcagaaacaaagattgtgtgtggatcgatgatgacttccatatatacattccttggaaagctgaacaaaatgagtgaaaactctataccgtcattctcgtcgaactgaggtccagcacattactccaacaggggctagacagagagggccaacattgattcgttgacatgggtggcaccaaggggaccatccaggcttaggatggggtttctttgggtgaatggtagacacaggggagtaggatctcccatgcacaggacataccttgtttgaaggacttctgtgtcctagggctggataactcatgtgctgtctggaggactaggtgaatggcagattgcatgggaagagttaactggtagcctgcctctgatggccaagtttgtccttgagtccaagctctgggtaccgaagtcccccagaggaagacagatccttctggttgcggggagagcaaaaggctacacctttgccattagttggctcattttatccttagctgaggatgttggagttgtgtttacccggcatagcctctgtgcctatgtgcccatgttgtgtactgtgcattgtgaggatgtatatttggcatgaacaggcaggcttcctctccaaactggggctgatagacagcgaggctctgggttatcccaaaccagatacaggtcaatggcttcctctttaggggtgcagggccttgattattttgtgactggcattgcaggtgttgaaacaagggtattgagaaggatgctcaacatcagtgctctttagcgggatgatgcattctgagggctgccatccccaagatgagcatacttgtgtccataaatttctgggttcacgaacaagggaagccagagacaggcatattccagataaaccacagggggaagatagcatggtcctcgtgacctgtgcacccgtctgcctttctgaagcatgcttctttatcctctgcacttcgcaggtagtgttggtgtaaaaggcaaacccgtgtcatgagggatggtcatcatcttgtgtgatccttggagatggcaggaagccctggacatacatggtgtgggggctcctccagaggctgttgggatcctcctggatgtaagtgattccatttcaaagcaccctgagtttcctcatttgcagggatggagattgtgtgtggatcgatgatgacttccatatatacattccttggaaagctgaacaaaatgagtgaaaactctataccgtcatcctcgtcaaactgaggtccagcacactgctccatcaggggctcgagagagaggaacaacatccatttgttgacacagactgcaccaaggcttggggtggggtctttttctggcagaggagagtagctgggaattttggacgtttgtaactaagagacagcttggttgaaggcagccaggtgtgtcgtcaatttgtaccttgggtcccttgtcctccagaggaagactattgcttccacatggggagacagcacaaggtcattcccagacacctctttcactcactttcatccttgtcaagggacgtaggacttcccatggtgtttggatagcatcaggggcaggcaggcagtcttcaggaggatggcgatgctgatttgctttctgcagaggagcccagagagggtatccacactgaacttgtatgtccataggaggaaacccaaaccgcatggtcccagaagggtcctggtggttagaaggggagaaagctgcacatgcatttaccacacagtcttctgtctgggttgtggagagatgactgtgagcctcttttgggtgttatagggtgcatacggtttattttatgatgatcttgggatgctgggatgggaatgtaattgcgaatccatgtgttcccgcaactccacagacttgacttggtttggcaggtttgtgttcaggccctctgtggaatgcttgtcttcattaagaatttgagatggggctgggcacggtggctcacaccttctgggtgcttgagctgcacctgtgagaaagaccccgaggtggaggctgaattgtgattgagcatgtttcttgaatgtgaagtgtgttgatggatgcttgcagtaaaaatgcttcaaggctaaaggaaaattgccctatgcacaggaagagttttttttttcccaaaactctccccattcaaatatctctatggtctctgtcttctctgatggccaagggaagggcttttgagtcggggcaccaaatgagtggtgtccagagttcttcacatttagtgctctgaagcttgctggtgccctcaaaatgtatgtgtgcctcaaaccttcatgcatgggtactcccatgcacacatcctgaaatgggtatcccatgggaagtagcgatagggtatcccacagggggttgaatggcatggcccttgtgacctatgtgtttgcctgcctttctcaagcacacccgtgttgcctctgtacttcctaggtggtgtgggcatggaaggaaggccagtggagacaatggatgatcttgttcttagcagatcactggatgtggcagggagtcctaggacatgtgtggtgtgggcttcttcaggtgctggtaagtatctattccccaaaaccccctaatgttactcctttgtgggcatgaagactgtgcatggatcgatgatgactttcatacatgcattccttggaaagctgaacaaaatgagtgaaaactctataccgtcatcctcgtcgaactgaggtccagcacattgctcttacaggggctggagtgagggccaagtttcatttgttgctgcaggttgcaccaaggggtttgttcagttgtaggaggggctccctttctgcaaggggtagtcacagggttgtgagatctctcataaataggaaattgttttagggacttctctctgcaaggtaacacacacacaccgtctgtaggactatgtgaatgtgaaggtgacatgggaagacttagcctgtagcctgcctctggtggccatatttgtccttgagtcttagctctgggttccatcattcccttgaggaaagacaggtgtttgtgcttgggaagagagcacaaagccccacctttgctgttttttccactcattttcatcattgttcaaggacattgcagttccggttttatccataaccagggaagccagagacaggcagatagcagatatgccatagggggccagatgacacggccctcatgacctgtgaatgtgtctgcttttttgaagcacactcgtatttccgctgcacttcccaggtggtgttggcatgaggaaaggaggtatcttcgagggacaatcttcttcttgtgcgatccttggagatgccatgaggcccctggacacatgtggtgtgggctcctttggaggctgttgtatcccttctgaatgtaagtgtccactttccaaagtcctgattttcctcatttttgggcatgaataatgtgcatggatcgatgatgacttccatatatacattccttggaaagctgaacaaaatgagtgaaaactctataccgtcatcctcgtcgaactgaggtccagcacactgttcatcaggggctagagagagagacaacatccatttgttgacacaggctgcatcaatgcttgggatgggatcgtctttgggtgaagtggagtagctgggcattttggacttctgtggctgagagacagcttggttgaagctcttccctctgtgtggctatgtgtgttatcgattcataccccttggctcctgcactccccagaggaagacagttactgctgcatggggacacagcacaatgttgttcccaggcacttcttcggctcacttttatcctaagtcggggacatgggagttcctgtggtgtatgggtatcatcaagggcaggcagtcgtgaggagggtggcaatactgatttgctttctgcagagaagcccagagagggtatccacgttgaattgtatgtccataggagggggaaacccaagtcccgtggcccctgaagcatcctggcagtggaaggggagagggccgtgcatgcgtgtaccacacagccttctgtctgggtcacagagcgacgactgtgagcctctttcgggcattgtagggtgcccatagtccatttcatgatgacctcagggtgctgggatgggaatgtaattgtaggtccacgtgctcctgcatctctgcagactgacttggtttggaaggtctgtgttgaggaacctctgtgggatacttttccttggtgcatttgaggtgtctgataatgagtgtgtgggtttctgtatcctggtgacttctactcagaaatgtgacccagcaaggtctctgtgcttaaataccttagtggcttgtgatgttaggttattttcaaattcctcctaattgtgtgtgacaattcacacaagtctttgtgaaattgtccttgaattgtatgacagggctagtgtctgtaggccagtgatggataagttttggactccacagccatgttcacagccaagtggcttaagatgtatggtgttcttagtcatagtgccttggaagccctgtaggattcagcatgtcttgtgctcttctgggtccccgagctgtacctttgaggaaaacccagaggtggaggttgatttgtgattgagcatgtttctcagtgggaagagtgtcaaaggagcctggggtgaaagtacttcaggaccaaaggaaaattgcccttcactcaagaagaggctttccttgaacctgtccccactgaaatatcctcatgggcttcatcttctctgatggccaaaagcaggacttttgattcagaggtggcaaatgaatggtgttgagagagtttgttatgcttggtgctctgtagctggaaggagccctcaaaattattgtgtgcatgatagcttcatgcctgcttacacccatgcacatgtcccagtaagaggggctgcctgtgggagatacatacacgatacaccacagtgggatgaattgtatggcccttgcaatgtgtgtacctgcctgctgttgtcaaacacacctgtttttcctctgaactttccaggtggcgtgggcatagaaggaaggccagtggccacgagggacaatcttggtcttgggagatcctggaaatgatagggagtcccttgatatgtgtggcatgggctccttcaggtgctagtggattccttaggatggtaagtgtccatttctcagaagctccagatattcctcctctgcagggacaaagactgtgcctggatcgatgatgacttccttatatacattccttggaaagctgaacaaaatgagtgaaaactctataccgtcatcctcgtcgaactgaggtccagcacattgctcttacaggggctagagagagagggacaaatttcatttgatgatgcccattgcaccaaggggttctgtccaggcttaggatggggtctcgtttgggcaaaggagaatggcaggggagtggaggctatgtacacaggagattccttgtttgaaggactctatttgtgaggccagggtaccacacatgctgtccgcaggagtaggtgaatgtgcagttgcccaggaagagttagcctgtagcctgcctctgcatggcagtttgtccttgggtcctggctctggatttccatgttccttggaggaggataggtgattttgcttgagaagacagcacagtaccatacttttgttgtttttctgctcatttcatcgtccattgaggacaatgaagttgtggtcagcaggcatagctttcaggccagcgtgcccatgttgtgtcccatgcattgtgagcacatgcatgtggcatgaacacataggctgccactccaagctgagtctgataggcaatgagactctggcttatcctgatcccggtgtagatcaaagtcttcccagtaggattgcatggccccgaggctattgtgagctgcattgcaggtgtggaagcaagggtgttgagagggatgctcaacattagtgctctttagcgagatgatgcactataagggcaccctgaacccagacgtgcatccctatgtacgtgcatttctgtgtccataaatagttgaagccagacagccagattccagatgtatcgcagggggctggatgacatggcccttgtcacctgtgtacctgtctgcctttctgaagcacgcttgtgtttcctctacacctcccaggtagcattggcatggaaggcaggcccatgttggtgagggacaattgttatcttgtgtgagccgcagggataccaggaaacccctggacacaaatggcaaaggcttctttggaagttgttggatcccttctgcatgtaagcagttctttcccagagcgctctgattttcctcatttgcagggacaaacactgtgcgtggatcgatgatgacttccatatatacattccttggaaagctgaacaaaatgagtgaaaactctataccgtcatcctcgtcgaactgaggtccagcacattactccatcaggggctagacagagagggccaacattcgtttgttgatatgggttgcatcaaggggtccatccaggcttaggatggggtccctttgggcaattggaagtcacagggaagtgggagctcccatgcacaggaaattccttatttgaaggacttctttctccctgggcgggataactcacctactgtctgaaggactaggtgaatggcaggtggcatggaaagagtttgtgggtagtctgcctctggtggccaagtttgttcttgagtccaagctctggattcccagaggaagacagatcccctggttgcggggagagcacaagcctacactattctcacttgttagcttgttttgtccttggcggaggacgttgtatttccaggcacccagcatagcctctttgccgcatttccatgtcatatcccatatgttatgaggatttgtgtattgcatgatcaggcaggcttctgctccaagctggggctgtcaggcaaggagtctctgggttattccaaacctgatttaggtcagtggcttcctctttcaggattcatggccccaaggcttttgtgagcaccattgcaggtgttgaagcaacgatgttgagagggatgcccaacatcagtgctctttagcaggatggtgcacctcgagggcccctggccctgggacgagcatctgcgtgtccatgcatttctgtgtccatgaacaggcgaggccatagacaggcaaatagcagatgtgtcacaggggactggataacatggccctcgtgacgtgtgcaacctgtctgcctttctgaagcacgcctgtgtttcctctgcacttcacaggtggtgttggcatgaaaggcaggcttgtatcatgaggaatgattgtcatcttgtctgattcttggagatggcaggaagcccctggaaacacatggtgtggactctttcacaggctgttgaaaccctcctgaatgtaagtgatttcattccaaagcaccctgagtttcctcatttgcagggatgaaacctgtgtgtggatcgatgatgacttccatatatacattccttggaaagctgaacaaaatgagtgaaaactctatactgtcatcctcgtcgaactgaggtccagcacattactccaacaggggctagacagagaaggccaacatccgtttgttgacatgggttatatcaaggcgtctgttcaggcttagaatgtggtctcttatgggtgatgggggtcacaggagagtggtggctcccatgtataggaaatttcttgtttgaaggactgtcagtgagggtgggtaacacatgcattgtctgcaggactaggtgaatgtccatgtggcctagcaagagttagctggtagcccgcctctggttgccaatttgttcttgagtccttgttctgggttctcaggtcccacggaggaaaacagatctgtgtggttgagaggtgggtacaaggccgcatctttgtcatttgttggctaactttgtccttggttgaggacattagagttttggtcaccaggcatagcctatgtgcctttgtgcccgtgttgtatcccacgtgttttgaggacatgtattttgcacgtaaaggtgagctcctgctccaagctggttctgataccaaaggagtccctggcttatcctaaactcatggtaggttaaagccttcctccttaggggttcagggccgcaaggcttttgtgagtggcattgcaggcgttgaagcagtgatgttgagagggatggtcaatgtcagtgctctttagcaggatggtgtactgcaggggcccccagccccgagacgagcatccctgcatccatgcatttctgcctccatgaacaggggaggccagagacaggcagatagtagataaattgcaggggactggatgacatggccctcgtgacctgtgcacctgtctgtctttctgaagcacgcctgtgttaactctgcacctcccaggtagcactggcatggagggcaggcacatgttggtgagggacaattgttaccttgtgtgagctgcggagataccaggaagcccctggacacaaatggcaaaggctccttcggaagttgttggatcccttctgaatgtaagcacttctttcccagagcactctgagtttcctcatttgcagggacaaatactgtgcgtggatcgatgatgacttccacatatacattccttggaaagctgaacaaaatgagtgaaaactctataccgtcatcctcgtcgaactgaggtccagcacattactccaacaggggctagacagagagggccaacatctgttttttgacatgggttataccaaggcatccgttcaggcttaggatggggtcttttatgggtgatgggggtcacaggagagtggtggctcccatgtataggaaatttcttgtttgaaggactgtcagtgagggtgggtaacacatgcattgtctgcaggactaggtgaatgtccatgtggcctagcaagagttagctggtagcccgcctctggttgccaatttgttcttgagtccttgttctgagttcctggaaggaaacagatttgtctggttgggaggagaatacaaggccacatctttgtcgtttgttggctaactttgtccttggttgaggacattagagttttggtcaccaggcatagcctatgtgcctgtgtgcccgtgttgtatcccatgtgtttgggggacatgtacattgcatgaactagtgagctcctgctcattgcttctgatacccaaggagtccctggcttatcctaaacccaatataggttaaagcctttctcattaggggcccagggtcccaaggcttttgtgagtatcattgtaggtattgaagcaacgatgttgagaaggatgctgaacatgctctttagtgggatgacgtactctgaaggctcctgacccccagatgagcatccttgtgtccgttaacttctgtgtttatgaacaggtgaggccagagacaggcagacagcagatgtattgcagggagctggatgacatggcccttggaacctgtgcacatgcctgcctttctgatgcacgtccatgttttctctgcacctccccggtggtgttggtataaaaagcaggcttacatcagcaagggatgattgtcgtctcatgcgatcctgggagatggcagaagtcccgggacacatggagtgtgggctctttcggaggctgttggatccctcctgaatgtaagtgattccttcttaaagcatgctgattttcctcatttgcaggggcaaggactggatcgatgatgacttccatatgtacattccttggaaagctgaacaaaatgagtgaaaactctataccgtcatcctcgtcgaactgaggtccagcatactgctcatcaggggctagagagagggacaacatccgtttgttgacaagggctgtgtcaacacttgggatggggtcgtctttgggtgaagtggagtagctgggcattttggacttctgtggctgagagacagcttagttgaagcacttccctctgcgcagctatgtgtgtccttgattcaaactccttggctcctgcactccccagaggaagacagtggcttctgcatggggacaccacacaatgttgttcctgtgcacttctttggttcactttcaccctcatttggggacgtggcagttcccatggtgtttaggtagcattgagggcaggcagtcctcaggaggatgttgatgctgatttgctttctgcagaggagccagagagggtatccatgttgaacttgtatatccataggaggaaaccagtcccatggcccctgaagggtcctggcagtgggaaggggagaggtctgcatgtgcatgtactggacagcatattccatgtgggtcatggagtgatgactgtgggcctctttcgggcattgtagcaggcccccatttcatttcatgatgacctcggggtgctgggacaggaatgtgattgcgggtccacgtgcttctgcaactcctcagactgacttggtttggaaggtctgtgttcaggaccctctgtgagatgcttgtctccattaggcatttgagcttatatcggcccagggtttctacctatcgtaggttgtgcatactttgcctctgaaccactcaggcacctcgatgcagtcaacgtgcccgattataagagtgtgacttcccatatcctggtgatctctactcggaaacatggtccaggaaggtctctgtgcttaaataccttagtagctcgtgatgttaggttattttctaattcctcctaattcttcccaggagtcttctttgtgaaatagtcatcttgttgtaggacagggctggtatccacaggcagtgatgcataggttttgcactgcgcggccatgttcaaaggcaagtgccttaaaatgtatggtgttctcagccacagtgccttagaagccatgtgggattcagtgtgtctggtggtcctctgagctgcacctgtgaggaagacgctgaggtagaggttaagttgttattgaacgtttttctcaatctgaaaagtgttcaagcagcccagggtgaaaagtcttcaagactgaaggaaaattgccttttgtactggaagagtttttccccaaaactctcctcatttaaatagccctgtggcttgtgtcttctctgatgaccaagaggagggcttttgagtcagtgatggcaaatgagtggttttgagagagttcttacacttagggctctgtagcttgatggtgccttcaaaattaacacgtgcctgctatcttcattcctgggtagacccatacacccatcccaaaaggggagtagcctgtgggaagcacatatgggatataccacagtgagtcgagtggaatggcccttttgacatgtgtacctgcctcccgttcttaagcacacccgtttttcctctgcacttcccaggtgttgtggccatggaagtaaggccagtggctacgagggacagtcttcatcttgggagatccctagagagggcagggagccccttgacatgtggaatgtgatctctgttgggtgctggtggatcccacaggttggtaaatgtccattttccaaaagcccctgatgttccttctttgcagggataaagactgtgcatggatcgatgatgacctcaatacatgcattccttggaaagctgaacaaaatgagtgaaaactctataccgtcgtcctcgtcaaactgaggtccagcacgtggctccaactggagctggagagagagagacaacttccattggttgatgtgggttgcactaagccatccatccaggcttaggatggggtccactttggatcaaagggagtcacagggcagtaggtgctcctgtgcagaggagattccttgtgtgaaggacttctctttgtgaggctgggtagcacgcacaatgtctgcaggactgggtgaatgtgcaggtggcacagaagagttagccggtaacccgcctctgtgtggccaggtttgtccttgagtgctggctctgggttcccttgttccccagaggtagatagctccttgtggttgggaagagagcccaaggccacatctttgttgttctttggctcattttttttcatggctgaggactttttagtgcccatggtgttttcgtagcagcagtggaagtcagttgtgaggaggttggtgatgcttattttctttctggagagtaccctgtagatcggctccatttatgatttgtgtgtctccagggagaaactgaaatcccatggctggtgatggatactccaggtgggaatgagaaagcgccatacatgtgttgacttggtaccctaagatggggatggtccgccacatttgcgcgtctgttttgcatggtgtgtactgcacatcacaaatgccatgttggccttagggtgctgggaatggaatatgatctgatgtctacatgggagggcctttcagcagattgcttttgtttcctgacagtctttgctccatccccagtcacacgtgtttttctccagggaacattttattggagtatatcaggtcgatatcagaaaaaaaaatgttgtggttatcccaacattaagtgtggtgatgtaacagcagtgtggatggtagctcaagtgaacagtggcaaaaccaaaatatattggtttacgtaagtgaccctattctctcctatgtttgaagtctggtatgcatctctttctgcaataatctcagtgatctggaaactttcaggaggtcttttttagatattttatgtccttgtggttgtactcatactccctgcagtgctaagtctgagtcattctgctatcctagtgctactggaatttctattgttttgggggcactgtctggtcattgtggatacctctcttggggccctttaataagaagtatgttagaggtcggttttggggcagtgttgacctcctgcctaaggtcaaaggcagttttcttcctaaatcttattgcaggattcactgcctgggggttgtgtgacagggagagcacaaaattagggtatcccatgtggacttgtgtccagtatcaaggcagtgttggataattttctatatccacaaggctcccactggactctttatgtccagcagacattcacaggccaacttttctcttacacagggggcctcattcctgccatgtgtagcttccatggaaccatccttcaggttttaagtgcaaggatttctctcaagagtttaatttgtttctttaagacaccgttttcttttctataaattctgctttctgtggtttgtagcacagatgaaattgccaggtcatattctacatttctgcccaatcttggattagtgagcctttgaaatatgttccttgatcactggcaatggttcttggaataccagaacttagttacaagcattgcagacctacagaggtttgttgttatttttaactgcatgaagcagtgggtttgtttgtatcttgtcactcacggctgtcagcaaaacttaggtgttgctaaaccagaccacacccatgaattatagtgcctctggttccttctgtagtagcctgtgggaagtagatacaggatgcaccacaagggaatgaatggcatggcccttgagacctgtgtacctgcttgcctttctcaagcacacctgttttgcctctaattcctaggtggtctggcatggaagaaggccagaggctgcgatggatcatctttgtcttgggagattcctggagatggtggggagcccctgggcacgtgcagcatatgtggcgtgggcttcttcaggtgctggtggatccctcaggatggtaaatgtccattttccaaaatcttctgatattccatctttgtaggtacaaagactgtgcatggatcgatgatgacttttatacatgcattccttggaaagctgaacaaaatgagtgaaaactctataccgtcatcttcgttgaactgaggtccagcacattgctccaacagtgggtagatagagagggaaaacttccatttgttgacgcaggttccattgaggggtttgtccaggcttaggatggggtcccctttgggcaaagggagtcacaggggagtgcggcctcctgtgcacaggagattccttgtgtgaaggatttacctctgtgagagcagggtagcacacataactatgcaggagcaggtgaatgtgcaggtggcacaggaagagttagatggcagcctgtctctgcacagcgaggtttgacttgtcctagctctgcattccctcatcccttagaggaagttggtttcttcagaagacttaaatttgtggaattcagtagaatattatccacataatgttcccagtgaatgctaggcatatcacccaagatggccaggcctctggccataaaccatagtaaatagtagggtgtgcatatatccattagggagaacctgaaaggtccttttttggccctccaaggtgaatgcctgcaaaagcaagcgaagcacgctatctgcctgcatgagccccatgtacctggcgtggcctgtgctcctcaccgtgtgtcccacttctgctgccccttcgccttgccaggtggagtctgactgattttttgccactgctgccaccacaggccacctggagccccagccagtttgaggaaagtggctctgcttgattttccttttttctttttttttcctctttttttctccatttctgacttcagcaggtgggacttggagcttctgcttctgcagccacagaagactccccagtttggagggctgtggttgtgggctccctaagcatctctctgcagagcctctttgttttccattttacccaccatgtcaataatttaacacagtggcggaggagttcatgtctcttcctatttgtcattactcttctaactttcacagctgtactcggctactggtcagaataagagaaaaagcagtggaaccaggaggatcctacaagaaatattccatttcacttttgtttgtgcatataccttttctgtttaaatgtggacttcgatttgatatgcttccagtgcagacacagatcccatatgtaagagagtatggagttgcatagaaagaagacttgtcattttcctgtactgttggtgttctaatctgtcttcgtggtttttgcctcttctggctttagaagatacaccaacatggttttgcaacatagcctcttcttattttagtaagggaccaaatgtgcatgtcagtaacaggtgttaccttgaattgggatcagtgcttgtgtgactatattcagtgatgtcattttctgtcacactcaagtcacaaaatatttaaccacttatttttttatctctggaggaataatccaaaagattgtactggtaaagccagaacaatttccaattatgctaattatttgtataatacttagttggctttatctgtggtttgttggcttattttcctgtagcttttcaaggtttttctatgagttctgttaaagagtctgaaaatggagcgtagaagacatgcttcgatttccaggatggttgtgttttccagagaggcggaggtaaaccactggcgcagccctgcctcccacagataattccgggtgcagtgtttcatatctagacttggacttctatcctaccatacttctttgtgtgcaggtatttttggggataaaatccttgttttcagctgtatagatgtcttgcacatactcttttgatggtttgatttatccattgtgttcagcacgtttcagtgagcaagatatgggatttaatttccaatataaaatccatgactgctggccgggcgcagtggcttatgcctgtaatcccagcactttgggaggccatggtgggcagatcacgaggtcaggagttcaagatcatcctggccaacatggcaaaaccccatctctactaaaaatacaaaaattacccatgcgtggtgttgtgtgcctatagtcccagttactcaggaggctgaggcaagagaatcccctgatcctgggaggtggaggttgcagtgagctaagatcatgtcactgtattccagcctgggcgatagagactctggctcaaaaaaaaaaaaaaaaagaatgttataattattttcagcctcatgtctccgtgtcacacacaggtccatgaagctgtgttctttttttttttttttttttttttttcagagtattttctttcttgtccagattagctaaattggattgttctatgctaaattcacttaatcactactctattatttttgaattttttagttctgtttttttcacttggttctttttttaaaaaaacttctactacctttctgagacttctacttttttacttttttcaagaagctttataattacttgctaaagcatttttaccatgactgtttttaacttcttcagataaccacaacatttggttaatcttgaggttggcttggttaactgtcttttctcatcctgcttatgattttccttctaattgtgatttttccggttcttgatagatgggtgatgttttagtttatcctgcatttttttttcctttttaagttagaggaatctgaatctattcaaatgttttattttagcaggcatgtgccctgtttaggtttaatttgaatgtcctgtcctacttttgtaggccatgttttcgcaggcagtcttgctatcagagctgaggggatgctgttttgatcacttagtttatctgatgttgctgggcctccaactggtgctgactggtacttcctgagatggcgaaggtttttctgtactctgagatgccgtgtatctctatgtaaggggaggagactctggaccacaggaatgaagagaacatcttaggtcaggcagctcaatcatatgcgataacctgggtcaaccagccagtagcctcatgaagtatgggagggaattctccagtgtcagcattcaaagacatcatgagtttttacttctcattttcttttaagtgaaataatcgcatggaaattaaagaataaatatatgaaatatatgaaacttatatgaaatataagaatgtgagaaggcctacagcgtggggatccccaggctatttgaacaatgaatgtctgtgttacacatctttgctcactttttctctatttttgtagttcattgtggaaccagcacagattttcatacgaaagttatttctttttaacctcaaaaagtgacagaatggagtgtatcatgaaaaagtctgacatcaaaacctcaaaatgtgatattggtaagcattttgtcctgagaataccagcatttcctcttaggggatcatgacactgcagtgaccatgtgaccctggctgtgctagtcagcctgggctgttcattgactgtgatgctggtctccatgtgattgactagtgtgggtcagtgcctccaaaggtgacagctgtgtgctcagtgtctgccacatatctcaggctcaaggtcccttttataaatgtgcctggatcgatgatgactttaaaatggatctcatcggaatctgaacaaaatgagtgaccaaatcacttctgtgccacttctgtgagctgaggtccagcacaggggccatgccagacaaacacatggagggtgttttgtttggtcagcactggtactatgaaacggcctgtggaattagacaactaaccagctcacatacagtacaggaaattactggacagttaacctaccaatatatggttgggggtaagacggagacttttcaaatgcttggctggtagcatctgtacactacagtgaccagacactgggagccagcacaggagttataggatttacaggaaattattgtgtgaacccacaagccattcagacatttgtgtgagcgcccagaatattctggttgatggtttgttgcttgatggcaaagagatgtcagcattcaaagacatcatgagtttttacttctccttttcttttaagtgaaataattgcatggaaattaaagaataaatatcttatatgaaatatatgaaacatatgaaatataagatatttatttatatcatataagatataaatatctcatatgaaatcttgtagtatattttcatttgattgccaacccagtcactaggactgaaacagttgtttattttttgttttcccatcaaccaagcaagctatttaatacatgtttcagtgctggtttcaactacatgttgcagcaaacatttttagaagtgatatttcaaattcttggattttcacatggatttcattgtctactttcatatgtcctccatgtgtgaccactgtattaattaaaagttgtaataaatgattttgaaaggtatgtgctggaggaacttcgggacaaatgttttagaaaacattatttccataaaatttggatcaaagatgtgagcataattgttcttgttatacagatggtccaatgagtgtctaatgtgaattcttataactgtttataacaaagtagtccatgaagcaaattttgtttcacaactttcctaatttcccctgtactctgtagattgggtgagatagaattccatggaatttcattgccaaaccagtgaagtgctaattttgacatttgtaccagctaacgtagctgtgaagaaacacaccaatacacttctaaggtaacattcaatttttagtgaatttatttttgtgagttatttttattcttttaagtaatcaagaatttatgttcacaaggaattggttaatactaacagtttcagacattaatgttctgatgagctgaggcatcaatctccttttgataaaggttttgttcttttctctactttgaataacatatgaaatgtccaacagcagttctaagttagtgtatattccatatatgttaatagtgaaacatcctgtcttatgcaaggctaaaaattgtccgtgtatacttctcagatttgtatacatactctcttcctacaggacagcatagaccaagatctaggtttcatatggatgaatttattcttccctttgaggcaagacaagaaggaaagaaagtattgggaataatgctgccctcccatcctcaagggccagtgggaactctaatattggtaagccttttgtcctgaaaataccagcatttcctcttagggaatcataacactctgctaaccgtgagactctggctatgctagtccgccatgggctggtcattgactgtgatcctggtctccatgattgaatagtgtgggtcagtgtgtcccagagtgacagatgtgctcagtgtctgccacatatctcagactcaaggtcccttttataaatgtgcctggatcgatgatgactataaaaaaaatggatctcatcggaatctgaacaaaatgagtgaccaaatcatttctgtgccacttctgtgagctgaggtccagcactgggaccatgccaggcaaacatgaggagggagtttacagggactagggtattggaaaactaacctacccatatatattagagcaaatgaattgttctcagttctgtaaatatccagctgtggtttgacatagcaactctctttgtatttgcttggcagcatttatagaaacagctggtagaccctggggaaccagggcatagtgagattcatgggacgttatttcacctactcttgagccattcacacatttgagctcgcagaattatctggtcaatgagcagtctcttgagggtaatgagatggtcaacatccaaatccaaagatactaatgagattttacttttttttttgagatggagtctcattctgttgcccaggctggagtgcagtggcataatctcggctcactgcaacctccacctcctgggttcaagagattctcccgccccagcatcctgagtagctgggattacaggcgcccgccaccacccctggctaatttttgtgtttgtagtagagatggagtttcaccatattggccaagctggtctcgaactcccaacctcaggtgatccagccactgcagcctctcaaagtgttgggattacaggcatgagccgccgtgcccggccttactttttattttcaattaagtgaaacaattacatggaaattgaaaaaaaaaaaaggtactctaagtagactactctagtgtattttaattttcttgccaattcagccactaggattgtgtcacttgtttttttgattttagtttttcgtatcaaaaagcaaaccactgtttatatttgagtgctggtttcaactgtatgctgcctcaaataaacttagattatattacaaattcttttttacatagatttcattggctatattcatatatcctcaaaggtttccattgtgtttgaagaggtatcctaattgtaataaatgcttttgattggggatgccagggaagctttgagactaatgtctcagattttttttaaaaaagtttatattctatagtgatcaaagatgtaagaataatttttcttgtcattcattggatagtccagtgagtgtctactgtgaattcttatattcacttgtaactaaacattccatttggcaaatttcgtttcataacttccctaatttcctctacactttgtagattgggtgagatacaattccatggaattttaccactgaaccagtggagggctaattttgtcatttgtaccagttaactaacttgggaggaaacagaacaacacactcctgaggtagtatccaatttttagtaaatttatttttattatttttcaaactgtcagtgatttggtttggtgaacaataggttaatacagacaatgttaggaattattaatctgatgcgctatctgaagcatcagtttcctttatttttaagatttttttcttctctgtagtttggataatatttaaaacatttccaagagttataaattagtatattttctatgctgattaataatgaaaccttttgtcttatacagatttttaaaaaatggacgtgtgcgtgcatgtgtatatatataaatatatatatatataaaatctcttctcacaagatgatgcagactaaaactgcattttacattttatatggctaagtttattgtttccttgtgttgtaatatgatggaaagtaatgggaataattctgcttcctgtccttagggaccagtaggaattttcccatgataagcattttgtccttaaaatactgacatcctgttaagagatcatgacactccaatgaccatgagaccctggctatgctagtcagccagggggctgaccattgacagtgatgctggtctccatgattaaatagtgtgggtcagcatgtcccagggtgacagaaagctgtgtgatcagtgtctgtcacatatctcagactcagggttcctttttaaaatgtgcctggatcgatgatgacttaaagatttatctaatttaaatctgaacaaaatgagtgaccaaaacacttctgtaccacttctgtgagctgaggtccagcacagagaccactccagtcaaacatgtgttgcctggagttgcaactagttggtcagttagaagcaaccacagggactggggtatttgaaaaccacttgagtgcatttattagaggaaacgaattttacatttgtgtataaaaattcaattgtagggtaaaatggaaactctgagagtttggttggcggcatctatataccatagaaacagagcctgggaagcagaacagtgagacccaagagaaatgttcctgcctatacttggtctgttctcacatttgcctgagctactgattgatcttttgagggtgatgagatggtcaaaatccaaggatatgatgagtttttacttctcattttctttttttttttattatactttaagttttggggtacatatgcagaacgtgcaggtttgttacattggtatacacgtgccatggtggtttgctgcacccatcaacccatcatctacattaggtatttctcctaatgctatccctcccctagcccctgaccccccaacaggccctggtgtgtgatgttccctccctgtgtccatgtgttctcattgttcacctcccacttatgagtgagaacatgtggtgtttggttttctgttcttgtgttagtttgctgaaaatgatggtttccagtttcgttcatgtccctgcaaaggacatgaactcatgcttttttatggctgcatagtattccatggtgtacatgtgccacattttctttatccagtctatcattgatggacatttgggttggttccaagtctttgctattgtgaatagtgccgtaataaacatatgtgtgcatgtgtctttatagtagcatgatttataatcctttagatatatacccagtaatgggattgctgaatcaaatggtatttccagttctagatcctagaggaattgccacactgtcttccacaacggttgaactaatttacactcccaccaacagtgtaaaagtgttcctatttctccacatcctctccagcatttgttgtttcctgactttttttaatgatcgccattctaactggcatgagatggtatctcattgtggttttgatacacatttctgtaatgaccagtgatgatgagccttttttcatgtttgttggctgcataaatgtcttcttttgttttacttctcattttcttaaagtgaaacaatttcatgtggtatcttccaagtatattttaatcagttgccaacccagctgctaagattgaactgtttcttttgttcttctcttgtttttttctattaatttagcaaacaattttatatatagtttgctatccttctccatggggcctgcatcttcagattcaactagccatggattgaaaatacttgacaaaaaattgtatggtttcatctgtactgaacatgtacagtctttttctctctttttctctttctttcttttttttttttttgagacagagtttcactctgtcacccaggctggagtgcagtggcacgatctcagctcactacaacctctgtcccccgggttcaagtgattctcctacctcagcctcctgaatagctaggattacaggcgcccaccactgtgccaggctaatttttgtgtttttagtagagatggggtttcaccatgttggccgggctggtctcgaactcctgaccttaagtgatctgcctgcatcagcctcccaaagtgctgggattacaagcatgagccaccatgcccagccaagtacagactttttctttggttattattccctaaaacagtacagtataacaactatttacgcagcatttacattgtattcagcatcatgagtaatctagaaatgatttcctgcatataggaggatgtacataggttctatgccaatagtgcacagtgctcgctgtgtttaaagaaatatcctaggtatagaataaataattttgaagtcagtgtgttgagaaaacactgacatggatagaaaatattctgtctagaatagaaaaaacaatagaatagaaaaagttctatctgtatcagtctgatcaaagatgtgagcataattattcttgtcatacatatagtctaatgaatgtctaaagtgaattcttataactgcttgtaacaaaatatttcatttggcaaatgttatttcacaactttcctaattgcccatgtactttgtagattggttttcacagaattccatggactttaactgctgaaccaatgatgcactgattttgtcacttgtaccagctaacgcatctgggaggcaacaaaacaatactctcctgaggtaacatcgaatttttagtaaattcatttttgtgtgttgtttttattatttttttaagtaattgagaatttcattaggtgtgcaaggagtcacttaatacaaatagtattaggcattcaatactctcatgagatatctgagccttcagtttcttttattttaacattttacatttttctcaactttaacatcagaaacatcctataagtgtaataaaattcttatactttacatatagttacatagtaaatcctcctgtcttatttaagtttgaaaaatgaacatgtatacttctcattcccatgtatataatctcttcccacagaatgaggtggaccaagaaactgggcttcatacggatgaatttatttttttccctgtgtggagacataaaggaaaagtatagtgaataattccgcctcccacccacaagtccccatgggaattctcacatgttaaaaagcattttgtcctgaaaataacaacaatttttcttagggaatcaggacactccaatgacagtgagactctggctatgccaggcagccatgggctggtcattgtgctgctggtctccatgattgaatagtgtgggtcattggtgacagatagctatgtgctcagtgtctgccacatatctcaggttcaaagtcccttttataaatgtgcctggatggatgacgacttaaaaatgaatctcgttggaatctgagcaaaacgagtgagcaaaccacttctgtgcagttctgtgaactgaggtcaagcacagggaccatgccaggcaaacacgtgcagagagttcagtttggtcagcaactggtaccaaaatggcctgtggtattggaaaacaaacccactcacatagcttacagcacatgaattgtacagaggtctgtatgtgtttgtatatatttatatatgtttgtgtacatatatctttggggattatatggcatttctttcagtgtttggctggcagtgtccatactctcatagtaaacagaattacacaagagtagagggaacagtaggaaatggttttgcctaccctagagtcttttatacatgtttttaggtgctataatcttgtgtgtgaggtcagtctctcaggttcattagatggacagtgtaaaaggtattatgaggttttacatattatttatctattaagtaaaagaaatatatggaaattgaagagtagcttttatctattaaagaaaagaatgtatggaaattgaagggtactttctatttgtggaaagtcttaacattttaatttccttattgatcttgtcacagaagttggaatttaagttttgcctgtcactcaaagagaagctttttagacatttgattaagggattctagtagatgctatagtaaacatttctaattgtaaaatgattaaatttgcaattcatagagttttatgtggatttcattgcctgatattcattatttttattagtgggtttcatagatgtttaaagggagatcctagttttattgtgtgatactaagggaggccttttggtcttagaaaactgactttcagtactacccatttccagggagtgagcataatttttattctcataccacatgggcaagtgaatatctatggtttatttcttataactcgtcattagtaattatgaaagtaagaaagttgacaaatgaaactcttttaattatgagggtttcatttgtcgacttcctacttcctcagtgtgctttgtgtattggaggtaatactggaattgcatggaattcctactgctgctccagtaacctgctgattttgtcacgtgtaccagattcgttgtctggcaatgagaacaatacacttcagaggtaatattgcaatttttagtaagtgcatttttcctgggttcgttctattattttattttagcaagtaagattataattggtttttcaagcagtctgttaatccaaatggtgtgaggccctaataatctggttagtcatctgaagtttctgtgttctttgtacagtatttttatacttcctctgttttcaaataacattaggataccctactagcaaaataatttagtatattttatatacttgtgcatagtaagcctgttgtatatgtacactatttgcatggttggcaaattacatttgcactttttatttttctataattttttcctattttcaaaggttaatgtggaccaaaaactagatttcatataaaagagtttattccttctacttgaggtgtgacatgaaggaaagtaatggaaataattctgccctcccattctcaagggccagggggaattcaaatattggtaagcattttgtcttgaaagcaccaacattcttcttagggggtcatgacactccaatgacaatgagaccctggctgtgcttgtcagtcatgagactggtcactggctgtgatgctggtctttgtaattgaatactgtgggttggcaagtccccaggtgacagaaagatcagtgttcagtgtctgccacatatctcaggcttaaggtcccttttataagtgtgcctggatcgatgatgacttaaaaaaatggaaaccttggaaatctgaacaaaatgagtgaccaagacacttctgtgagctgaggtccagcacagggaccataccaggcaaacccgtggagggcgttcagtttggtcaggaactggtaccaaaacgaacccacttgcatatgttagagcagatgaattgtacagaggcctatatatcttcgggaattacatgacaatgatttaagtgcatggctgacagccttcaaacacctagtaatcaggctttggggtaccagcgtcagaggagtgaacactgtagaaatggctgtgccagcactcgagtcattcacactattttcgtagacgccacaacattcttagtgagtatcagcatgtataggtatattatgtagtcaattagaaagaaattatcagtctttgcttgctatttattctttcactaaaagaaatatgtgaaaattgaagagtgggttgtattcatgggattatcttattacatgctggaatttgcttcctaactcagtctcaaggattagaacagcatttgtttttctttttcctgtcactcagggagcaattttctaagcattagatgatagattaaattagatgcttcattaaacattttaatgtgaaataatgaaatttctaattctagggattttagatggatattgttggctaataggaatattccttcattgagtctttgtatattttaagagagattctaattttagtaatactcggggcctttggccttcgagaccaaaatcttggaaacattgattttctgtacttaccctgttccaagcaacaagcagattttttagttatgtggatagtcaagtgactatggctaattaattacaaactgttgtcaggaatcattcagttgggaaggttttgtttcaaaactcctgtaatgtcccctgtgccttgcagaacggaagtgattttggaattgcatggaattctcactgccatcccaaagaaatgctgatcttgtcactcttacctgtttcattccctgggggcagaacaaaaggacgcactccaaaggtaacatccaagtttgaataaatttactttttatggcttattttgtaattttttctgtagtcaagtagataatcagttttgtgaatgatctgttaataacagtatgagacattaattatctggtgaatcatccaaggctttcattatcctttatttccaattttttttgcgttctccttttcagtaatatcaaaaacatcctagtagagttatgttagtatatttgatattaatatacataacaaacgctcccttcttgtgcatgtttgacaaatggacatatatacttaccatcttcccatatttgtactgttttcacagatcggcatgaaccaagaactgggtttcatataaaatattttattctgtcctcttgagatgtgacatgagaaaagtattgagaatacttctatcacctcatcttcaagaatccgtaggaattctcccatggtaagcattttgtcctgaaaatactggcattcctcttaggagatcgtgacactccaatgaccatgagaccctggccatgctagtcagccattggccagtcattgactgtgatgccagtctccataattgaatgaatagtgtgggtcagtgtaccccaagctgatggaaagctgtgtgctcagtgtctgtcacatatcccaggcttaaggtaccttttataaatgtacctggattgacgatgactttaaaaaaaaaaaatctcattgaaatctgaaaaaaatgagtgaccaaaccacttctgtgagctgaggtccagcacacatgataggcaaacgtggagggatgtggatggtcagtgcccacagggactggggtatttgaaagctaatctgcctgcgtatgttagaggaaatgaattggacagtcatctataaatatcgtattttttaataaaatggctattcctttggtgcttggctggtagcatccatccactggtagtaaatagaccctggaaaaccagcacatatgtagtgagaccccatgagacatgattgtgcctacctttgagccatccataagttatctgggacatgacagtcttttgagtgagagcagtttactaaggtcatttagatcatcagttccaaagatggtgtggatcttatcgattatttttttaggcagaggtaatatctggaaaattaagagtgatttctaaccatgagaatattttagtttgtttaaatttgcttgctaacccagtaccaagaattcagaccttttttctgtctgtataaagcaatattctagacatttgagtgattcaagtagatgttgtgagatgattacatttccagtccttggaatgttatgtggattttattggctaatcttcatatttcatcagtggattttcctatgcatgttaagggagatccttgttaattgatgtctaggtggactttacggttaacctgaacaggtcttggaaaaaggactttaaacattctcctgttctgtggaataagtatacttttttctggacatacaccttgtcagtgagtatgtatcataattcctcataacttcttatcaggaaacattcgatgtagaagatttctttctcaacttctctaattgcccctgtggtttgcaggttccatgtgatactagagttgcatagatttttaacctttacgccaatgaagatctgaggcaaacattgccccttttttagaagtttgcatttgtcactgataactgtaataattgatcttgttgaaaagcctgggaaatgaagatctgatatgtcacttttaccggcttcctcaactgaaaaagaatacaatgaaacacgctgaggtaacatctaatttttgatatcttttttcctgggttattactgttttaagtatttaggaatttaatgggtgctatatggagtcagttaattcagatactataagaccttaatctggtgagtcatctgaggcttctgtttgttcttttccagaatttttgtgctttctcagtcttgctgatgatctttctatgggcctgaagcgtggagagtgccagagaggctgatcctcagcagtgtggcagaggaaagttgggtgcgactaaggggtatgcggtgcccacatgccactgggtcctcagcagtaccacctggtgagcgtcactcttgagagctgagagtaggtgggaagcagctcatggtgagagggttcagaggccgcctttccctctctgcgcactgcccagttcttctagtcacatgtcccgggacagtaccatacctgtgtgtgtcctgcctgcattgctgtgaccacttttagtggaatcaggtgcagtgcagctctgcagcttctgcaaattgccacgctcccactctcaagcaggttgagtgctacgagtgatttttagaccatttgtttattcccttatcatggctttttgtgacttcttcctccccagtccgttgggtcacctttaaaggtaaagtaatcctgaggtggttgaatttacggaaatgctatgcattattgtgaatgggatgttcaccgggccaacatcttcttggaactttgagcaaactgatagtctggttgcacatttgatttgtctggcagtaaatgttggacagtatttggactgatggaagctagagacaaacacattgactattgttgaataacactggaaacatcttaggagagcagtacattagctaatttaataggtacataaactgaatcccactgtcttgtgcttgacggaccagcagacacatatgcttgtatcgttctcatgtttctacatgtttaccctattcccacaggtcaacaaagacaaggcacctagccccacatgaaactttattcctttcccttttgagatgtgacatgaaagaaaataacagaaatgatttttccatcccatcctcagggaccagtgggaatgaattttaccatcccaccctcaagggccaggtcaggtcgctaagcattttgtcactaaaatattgcccttttttagggattatgtaatactctataaggcactgtctgtgctgggcagcatggagcctgggtcattgctgtgttgggggcttggtctccatgacttaatagggtgtatcagtgtgtcccagagaagtgtactccagagtgctcattttctttcatgtttctgaagcaaacagtgcccccttttttagaagtttgcatgtgtcactgataactttaataattgatcttgttgaaaaacctgggaaaacagtgagttaaataataacttctctgaacatgaggtccagcccaattacctgccctaagcaaactatatggaaggagagttcagtttgttcagctatgtggtcccagcaaggactgtggtactggaaaactaaccagcttacatgcactagagaagtagaattggacagtgatctgtaggtacccagtttggagatgaaattgcaactctgagttcttgattggcaacataaatacgttgatagtaaacagaccctggggaatcagcacttgagttgtgaaaagcgggaaatagctatgcctacactagagccattcacacttttgctggagctgcaataatcttctaagtcatgcttgctctcgtgagggcaatgagatggtcacaatccaaggagagttggggttttcacttttcatttctctattaagtgaaaaaagtatatgaaaattgaaaaatagatattacttatgtaatcttcacagtataatttgcttgccaagcagtcactgggatttaatcagtttctttgtctttcgtttttctcataagctgagagagtaattttgtgtgcacagaagtactgtcttcagctacatgctgcattaaacattcctagatgtgaaatgattaaatttccaagtttttaaaatgtggatttttctggccacttttatatctcttcaatgggtttctaatggatttaaggagagagcctagtcatgatgaatggtgttgtgttgggtatgctgaggaaactttgagaccaatgtttcagaaaaaattatttctatactgtcatgtttcaagtaccgagtattgttcttgtcatacagatggtccagtgaacatctctggtgaattccttacaaccaacctcttgttactaaatattccattaggaatgttttgtttctcaactccctgatttcccctttatagattggaagtgatattggtggaagacaacattttgccgcttggaattctcacctccacaccaaagaagtactgtttttgtcatttgcaccagcttctttctccaggaaagatcaaaacgatgcactgcaaggttaacatccaatttttaatacatgtaattccctggattatttttgttgtgttattaaataacttagaattttttttacaaagtctgttgaaccaaacactgtaaggcattaataacctggtgagttatttgaggccttttttcctctcctagaatttttgcacaatttatattttgaataatatcagagacatcctagtagagtaatgaattagtacattttatatgcagatacatagtgaagcctcctttcttatgcatatttgacaaatggacatgtatatttctcatcttcccatatttttactccatttccacaggtcatgtagaccaaaatgtgaatgtcatatgaaagagtttaaacattgcccttgaaatatgacagaaagtatcagaaataattataccattccatgctcacaggccagtgggaattctcacagtaagcattttgtccagagaatattcttcttagggaactataacattccaatgataatggtagtcagccatgtggctggatcatcgttcctgtatcctggtctctatgacttagtgtggtgatggtgtcattgtgtccaagtgtgacagaattgttagtgtgtagtgtctgtctcctatctcaggctcacagtcccttttataaacatgcctggattgatgatggcttcagtatcttttggaaatctggactgagcaatagaattgcttctctcaaattgatttcaagtcatataaaaggccatgttacacatatattgttaatctgagggaggctgtgatcatttaagttgtattttataaacactaggaccaccagtaagaaaacaattcaaaaaatattaaaagaacaaccaaagaattaaaatagaataaccgaaaagatctgtttaacacaaaagaaggcagttaaagatgaacagaggaaccaataagacatatagaaaacagataggaaaatgacagacataaacccagccatatgacaattatattaaatttttaagagattaggaaattccgttgttttttaaacatgagcaactatacgctgtctacagaagagacactttagaacaaaagatacaaatagttggaaagtaaaaagatggaaaaagctatatccagcgaatccagaagagagcagaagtggctattctgacatcagaaaaaagagactttaagataaagtattgctagagaggaagaaggatagtatttaatgatagaagggttaatatggaatatgtaacaattacaatcatatcagcactaacaacagtgcccaaaactacatacactgaaatttaacatgattgaggggatcaataggcaattcaacaataaaagcttttgttcataccctcttcttaatcagtgataagtcaattagatagagcatcattgaggttacaacatacttcagcaatgttgtcaaccaatttgacctgagatagatagatagacagttagacagacagacagacagacagagaaaacttcacccaacaacagaaatacaaattattttcaagcatacctggaacattctccaggatagagtatatgttaggctataaaactgtactcaataaatttaagattgaaaccatgtagagtatgttgtgtgaccatagaggaattagaaatcaacacagaaataaatttggaggtcacaagatatttggaaattaacacactttacagagcccattggtcaaaaatatatatattaaactagaaaggccgggggtggttgcttacacctgtaattccagcactttgggaggcgtaggtgggcacatcacttgaggccaggagttcaagaccaacctgggcaacatggcaaaaccccatctctacaaaaaaatacaaaaaatgagttgagcatggtggtgcatgcctgtagtcccagctactcaggaggctgaggtaggggaatcacctgagcccagcaggtagaagctgcattgaaccaagattgcaccactgcataccagcctgggcgacaaagtgagaccctgtctaaaaaataaaaggaatccagaaaacatcttgcatagaatttgatacaactaaagacatgcttagagggatatttatagttttaaataactgtatcagaaaaaaagggaagataaataaatgacataagcttccaccttaagaaacaagaaaaagactaaactagaagatgaaatccaaagcaagcagaaagaagtaaacaatagggattggagcaaaaattgatgacataaaaaaccagacaaaatacagagaaaaatccatgaaaccaaaagttgggtttgtgcagagatttgtgaaatttacaatcctttagctagactgacacagatcattagaattaggaatgatggagacaacatcactactgaccctatagattggatcaggaatgtcgctgtttgctgcattgtgctttcttgaggggagagctatgaaggaaaacaaagttctcattgcacttacaactcaacaacacagcgttgacattttgattctcactggcttcagtgctcatctctgtgaggtttccagaagatcccgtagcaatatcactcattctaaatttatctttgggctactctgggaacgctgtctatgggttagccctgctctgcaaggagcagtaagaaaatatatatatattttttgaggctgagtctcgctctatcgcccagacgggagtgcagtggcacgatgttggctcactgcaacctccacctccagggttcaagcgattctcctgcctcagcctcccaagtagctgggattacaggcacgtgccaccacacaccgctaatttttgtgtttttgtagagacagggtttcaccatgtgggccaggctggtctcaaactcccaacctcaggtgatctgccctccttggcctcccaaagtgcagggattacaggcatgatccactgtgcctggcaagtatgtttgtagccagtggggaattattttaactaggcaataatttgatctattttgggaagcctcttgtaatcaaatcatatatcaacattaatcacatggtgagtcctccatggttttcattcctagagattctaggatgtttgacatttctctgcttagcttatagcagaaaggtattggatatcaagaatgtttgaacagtttctcctttttgggaatgaagatgaaattgggctagaatgagatgtgtgattgagagaatgtccctgaggcctgagcagtgtgtccttttgggtatgggcattggaagcatgtagtgaattcttataattttatgttgcctcggcatccatcttgagtataagtttaactttgttataccagaagcaaggcttactcacttttgcacagtttccagttctacacctccttctcgttcctcagtgtgattggtccagatagctgccttatccaactgcctcctttggaccacttcatcatgggacagcttgatgcaatctacttgacaagaccctggaaccccacacccctcatggaaccagtgtccacctcccagtcacagtgtgaccccagggaactcttgcctgcttgctttaaacccaccacttaaaagtctccacagaaaacctgtttgaatagtacccttgacccaataagggcattggcccctgggtgtctctctctctctctctctctctctctccctctctctccctctctctctctcgctccctgacctctgcgtgtggactccaggcatgccatatacccctcaggacctgtaagtaatactatctttatttttattttatatctctcctaatcattgaaaaggtgctctctatcttgaagatactatattaaataaaatgagaacttgtccctaacacagttagtgataggctgaaacacgctgattgcactctttacccatttagtgatttttctcaagttactctacaccatgtattatcaacataattgatattacagaatagaattataagacacttcttttgccacagaaagttctattggactcagattatctagagctactacatgtatgctattctatgataaaagatgtagatgtgataaaaacatttataaaatatctgtcttagaaaagttagctaaaattattttgggaaaagtatgtttgaaaatagaatcgtaagctaccacattgtgataaatatttctaaatgtgtctattaacttgtcaggagacaacagagtgaattaaaacagtagccttgtatcagtatgtttttattcagaagacaaatgcacgttttaactattatatgttcttggcttaactttttttgtaaagttaagacattacacttttacatgaatctgtaatttcaagatatcttaatggttgacagggacaggacaattgaagaaaacctgtaaatacatttggtaaaatttatgatggattgttttgcagatggcttcagaggttattagcacatctgtttgagatatgcacagttttacatttgtcccttaggtaatcaacagggctgagatcagtaaatcacatgtaagccactgttatgaggctattctgaatagagttacatcattttatcatatctagactttctagttatattggtgctgttgaaaatgattttgtattacatgctttcttccaaatcatagatcaagatattttatttatgtatgtcttttaaatgaagagtggttaggatagtcctgattattgcacataaatattgcctttcactagattattgttttgggccaaattttagactattattttaaaaaagagtaccttagtttaatccaacctttccagatacttagaaattattgaaatgtatattttgtgaagatggtcttatgaaagttgttgagctagaaacatgtccttcaccagtggaattcttagaagctttccttgggcttcactgggtgctaatagaccatgatcgtattgctctgtatataatggtacaaattttgttttataacactcagtcttaatagaatgggaatattttatcttactaacgtagtcattagctggccactctctgtgtccattggaccttatagggtaaagggagggcagtgcgtatttgaagcctgtgcacgtgacacacaaagggcttagcaacctccgtgttttcccagcacaggatacccattcttcctgaatgtttcattgttaaattagattgtgtgtgtgtgtgtgtgtgtgtgtgtgtattttatattaacatacagatgtatgtattttagttgcattttttttcttaaaatgttattttttctctttttcttttatgtcaggtgatgatagagcccctagggaagcaaaactgtccatgcccttgccttaactttcagatacgataaaaacaacatttataaaatacctgtcttagaaatattagctaaaattatgttggggaaagtatgtttgaaaatagaattgtaagctaccacattgtgataaatattactaaatttgtttattgacttgtcaggaagcaaaagaatgaattaaagaaaactccagagaatgagctgacaacctactccctggtcagtggctctccatgcctacctgtggtctcttggacacccttgcaggtatgtgggcagggaactgcatgtttataggaaacaggcctaggatggaaggagttaatagatcttgctcttcttgagtttgatgacatttgtttccagttaaatagcatgaaaacccatctgagagccagctgagggtggatacagttctggggagttaaagacgagtggtcacaacaggtcttcctcggcaatccgagcccaaaactgaatctgcctccataagaccattatgtgtcagctctttatttatatgattgattcatccagtggacttttaatttcttatgtccagatattttttcagttctttttttcgtgatacaagcaccttgtggattgcctgtcatagaacaggttctcaataaacttttattgaaaaaagatgtataagtagattgtcttgagtaattttgtgaataacctgaccaactaagcagtagaagacaaatgattttaaaacagaaagagacataactttcagtgggattcaggtgatctagtcgggtctggaaatgcgcaagagagaaggtccctgatgcagtgtgctgacattgaaatgtgtagttgtggactagatggttatggtttcagaactgtgtaagtaaggggtagattccaaattaaatcaatattaaagagtagcagagaaggaatttccagattccagctgcattgcttgtttcattggaagtggtgtttctcttttttcttttttttctttcttttttttttttttttttaaacctcagaagatgacttcctgggaactcttctgggagtgaatgttatcagcaaattcccaaaacaacaccccttagacaaaaagcctcctcacctatgcattgcctagaccacccactaaaggtaagatgttagttaaaatagtccttgctttctgggagaagccatgtcttagtagaaattgagctgttaattttccgaatattgatgatgtttgattacattctaattgattctaagatttcataatatgttaagagatgcagcttttcttatataccttcgtggcttttctacatctcagtacatttactgttaatatgaaggatttccataacttctctcatctagtaaactgaactccttcatggcttgatccattgtgatgctagaaaattgttgtacacagaagacacagtagcctctccataactgttagactggaagtttgacaaactggtctgaaataactgatcaaatcaatgaatgacctagagctttaagaaaccagatgggaagagacagacatgaaacccaaggttgttgatggctattacttttgagcccagcaaaaggagaaaaagcagcaccaatatctggcatcctggacatgaggaagttttaatgtcattgttttggcctcatcatggacccaggtgctagaaatgagattttctctgtgtactctgggtatatttgttctagcacaagtagggggaagattaaagaggaatttcatacccccatgactccttaggaaatgtgtttctcacctttgccacttttccccactgtgtccttgcaggtgatggccacaaagaggtggatttgttgagttggtgccattccttctactgccagcttcaccaaaacaatgacacagtcttccttccgcatggagactcttctctttcctgtgttgcagtggatgcctcctgcagataagaaatgcttaactgagaaatgctcatgttgggatatcatcgatgagactttaatttgggcatggtgactgtttcccttgctgccacttgactcaatcccaggagcctcagtagaggatataatattacacaagatgctcaaaatggtggaattgctcagtgctcccataaatatacatttataattttcatttgccacatggtaaactgaaaaatacagactatattaaaaagaaactgcatgattttttttcaaaaattcaaagcatatttaaataatatataaattaaatgccctcctctcttccaattctgtccctatagttttcctctattaagtgaactacatgcattcttttagtggatagatgcacacaaacacacaagccattatggggaaggatccacgtgtgtggccatattgtaacacatttttctgcaaatcacctctttcatttaacagcccttattcaatggcctttttctttttcagtagtacatacacatctgtgtcatttgttgaatgacgacatgaatgttttgtagataaaatataattaaatgttttaagcatttctcactcatagatatttatgttagcaccaaatttctgtgcaatgaacctccctatatatcagtaattttgcatttgtctataatatcataataaattacttatcagttgaattactgggattaagtatgtgcacactttatatttatattttgaaaattattgcaagattgccttcaaaaatgtggttaacaactttatcttcaaatggcaatgaatgagattgccagctttcctacagcctcacagacaatggattttataaatatttaacatttttgccaatgtgatcacccaaactattgtcttaaattgtatctcttttgtttttgagtttggtcattttttcatgtttattagccatctgtattttttaatttcttctttatgtccaattttgtgggtgggaggaggatttagtctcttcctgatttcgaagagctcatttactatttcgggaaataagatttggattgtcaaccattatagctattttttacacacttttcaactttgtttttgttataagaatgtgtatgattgttacatgtccaagtataaccatgttcgcttttatggcttctgagtttcatgtcatttttggaaagatatatatattgagtccataaaacccttcacctatgttaaattctaattcttttgtgtttttttaattcaaattcttaaatcatgagaaatttttttgttttgaaatcttaaagttgccaagttacttgccattacttgcgattatttgccaataattgcccatttatctgtaccgccatcttgcgcatatgctgtactctcatctgtgactggctccatttttgttctgtggatttgtgtgtctcttcttctgcctcctgtctcgtgtctgctcgttggaagaaattacagtttagactgcaatttcatcaactttaataaatcaattgaggggagaattggtttttaaaaatattaagtaagtcttcgtatccaaggacaaggtatgtcttttcttattcaataattttaattactgttaatattttcactgtggtgatgggagtttttcttttaatttattttcttgttcattttttgtatctaaagtttttgttttgttttgttttgggggtaagttgtcaccttactgtttcttgttgcttttcagattttttcaaagtatagactaaatccttcacaaatatttaaagtttttattttcccccttcatattgatcctgattttagttatgttgacaaagtccacagactgttactatcagaacacttgaacagttatggaaatattacctacccttgatttaatcagagtttaatggtatgcttctttggtttgactggcacattgtcgctggtcatttcctcccaaagaccaccagaaagagctatgatcaagcaaagctgagtttgttaaacttacctgcagcaagggaaaacaccaccttgatagggtttaataatgtttcaaaatcaagaaatgaggctttggggtctgggcagggaactaattagaaatgggcaaaatttgtcatgcaataccttgtgggaaagtgagatgaggttcttaatgtgagtattgatggtgaaatcattttctaggtgagctgtttgcctatataaagatgttatcaatgacagaagaactatttgcctagataaacaaactgaatttatttattggtttacagttttatcttgctgggcaggactctgctgggggtggtatcaggtcttattcccaataggtaagttatttggatatgggtggtcttaatcatcaatgtgtaaaatgctgattttaagtgcgaaatactttgtctaccatgttaggaaagtctgccaccttttatcttttttaaggaattttaatcaaaaccaggtggtagatataatcaaattgttttgcagaatcaattttcctgttctctttaaagacttttatcactgtgaattaatttactattattgcaacttcctttaattccttgaatgaacagaccctactggttttaaaaatgttttattcttttaatttactacttaattgtgggtattttaatttgatttggaatttttacaagtatacaactaagtgaaattgatctgtgatttttcttttttgtgctatttttgtcatgttttgatatcagatattctggttgtgttaaaataattttgaggattttcttcttatactgtgttctagagtgggtaaaaaagccctagtctcactatcagtgtttaagtgaacacatcagtgacatcatctggactctcctttgtttttgctggtttggagttaggacatctagaagtttttttctttttttcctttttttgtatggttattgcttgttctttgttttgtgtcaaatttaacctgttttctcttagcaaatcacagctcatgcagattttcaaacacattagccttgttatacaaagtgttctttcatcattctattaaatttccattttcattccagttatagttatttctgctgtgcctttgttaatgaataagtttaaacagtggatgtttagcatcactagccttccccttccatctcccttaatcaggaccttggtataatttatcaggtattttttaaggttctaatttacttatatatattgtttctgtattcttttgtttcttttcttaataaattcttaaacctgtgtaacacattcatattcacttgttcttggcaatgaaagatttaccctgctgtgcattttataaaacttgtcattatgaacacattgtaaacatacagtgtatgaagagaagaaaacagtgaactagcacatacaaggaactggaactggttccatcattatcagtattttgccatatttactttgtgtttattttaagtattttcaaataagctagagaaatcttaacgcttcttattctcccataaacatttttacaattttatttttgaatgtgtatgtatacacattcgtatgcttttatattgttctataactttcttttatatcatgtaatatataaatattttaatatttctatctgattattacatatccatagatgtgaagcttccctatttttaataacttatatttttacataagtaaaatttacatagttaaatgcattgatatatagtaattgtataattcaataagtttcttaaaagtaattactatcccattcaggagatagaatatttttattacttgagaacctaccctattgcctctttccaaccaagcaccttctcaaaaaaacaatgttgtgatttttatgatcatagataagttttgcctgtttggaaattaatataaatggaatcacacagtgtgtgtctggcttcttgcactcatcataatcatgttgagatttatctgtgctattccctatatcagcagtttaaaaaagtttctatagttgtaatatttcactaaatggttatattgcagtttatctattctcttgttgacggacacctgagtagtttctagtttttagctgttttgaatgttagcagatctcttatgtaaatacctaaaaattgaattgtttgatcataagacagattttgcttaacttataggaaactgctagagagtcttctaaagagatggacacttttcgcactcccaaccagtgatatgagatttttagttgctgtccatttttgccaacattggaaattgtcagtcttatctattaagtgggtgtgaggtgatattttgttgtgacttcaatttgaaatttgaccacttaagaaggcaaccagtttttcatgaagttatccaattgtaaatcttctttagtaaaatttgtatatttttcccaacttttaaattacaattttgaagtaattttggacttacgggaaatttgcaaaaatagtagagttcctgtgtattctgtacccagctttctggatgttagcattttatataatcattattataacattattacatacaatgataattgaaatcaggaaattaatataatactgtcaaccaatctgcagactatattcaggtttttcaagttatgctactaatgtcctttttatctagtccaggatccaattcaagatctcttattttatctggcatgtttcctttgccctctctcctgactacaaatctgggagagctccctcagtctttctttgtatttcatttaattgacacatttgagaaatactagaccataatttggtacactagtcctcaatttggatttgtccgatatttttattattagattaaggttatgcacttttgacaaaagataacacagtagtaacagtgtgcccttttcagtggatcatctggagtacatgaagttaatgtcttatttctgctgatactaaatatgacgcctttattaaggtagtgtctgccaggtttatccactgcaaagttactgttttcctttctttgtaattaatattttatgagaaaataatttgagactatgcaaatattttatttcatctaatttcagtattaattgaagattcttgcctgcagcaattatgattatggtgtttacctagtaatggtttctatttccatgatactttctctacttactagaatttgactgtaaggaagatctgtccttcttccccatttatttgtactcagttgttattttacatcagtatggatttgtggatatcttattttatggattgttatatattgcaatcattgtttgtgtttgattttcaattttttttctggatttgatcattgggagctccttaaagttggcccctgtgttcttttaatacaacctcataattttttgaccacttcttattttcgggtatcacaagatattctaggtttatcttgtattttccttccccacgcctgtaatcaaccatttcctcaaggggttctagttcttcatattggaaaatagtatttagaaaccaagatcttggtattaagtgtattaattgctaatggggttttattgcttctaggcctagagctgggagctgtgtgtccgtttacacacatacacatacacacacacccctatattgtctctattcatttatctatcttaaatatatatactaatagtatgtagaatactatagatagtatatatctatctttattaaaaatcacaagttcatactgttgtggatcataatccatcatcatatggttcattttattcttccctcttggcttatttgtgatttgcttcttcaacagtgagaaacctacctttcattatctacaatatgttttgttatttcttcagtgcagtatacacttaaataatttcagaattgctaaattatacccctttaaaaatgaaatcactaactacagcacagtatttaaatatagttcttttgtctttatccttaacagcgttcagtcaacatactattatttctaaacgtatttaggttagttatcttttttttcctatcccctgccatatggttacattaatcatataatcaagcaggtttttttattgtttatattccattttgagttccctcaccttttggattattttaactatattttgtatatgtgaaatattactatgtttctaaaaattaggactgtgagaaataccactctcccatcatccctgctacactgattctattcctcccttctttccaccctaatctcacccaacccttagagttaactagtctaatagtttctggtttatttttttctcttgttattcttgttcacaagtgggcagatacatgtatattttatcatatatcacatgtatattttatatccccttccttcttacatgattagtggcatactatagatttttttttgttgcagttttctttttccgcttaatatgtcctggaaatcacttcatgtgtattcaaagagatattcctcattctgtcatgcttagtgcttaactccatggatgcaccacaatttattcaacccctctgctctatgagaattgtttgcaatatgtgtaaagtatcacactacaaatagttttacattggattgtttatttgctcttcgtttggaagtgttctttgtattactgggacatacatttcttgttcaatatatgtgttgcaaaggtttctttcattaagtatcttagcctgcctgccttcctttccatttcctttctttttcttttctttcttctccttttaatgctgttatgctctaaattttaaaatggcccgaatttgccagtggctcatcccttattgctatttattcttcctctccttttctcccccatctcttttcctttaatttacgtgaaattaacataacgtagccatttagtgcattcaaaatgttttgcaactgccatccttaactagttccaaaacattttcagcaccccaaagacaacccatacccattaagcagtcagtcccaactctctttccccatcttttcatttttgttttttggagtttttttgagacaaagtctcactttgcacccaggctggagtgcaatggcacaatcatagctcactgcagcctcaaattcctgggcttatgcaatacttccaccttagcctcccgagcagctaggactacaggcatatgtcaccacaccaggctaatttataaaaaaaattttttagacacagagtcttgcagtgttgcccaggcttcttgtgtctttcgataaacagacattgaaaatttttaagtccagtatatcagtttgagtctcttatttttagtgcttattacttactattaaatctttgcttactccaggtttgcaaataatagttttctaagttttcttctagaagctttgggacataagtataacatctatctcaaatcattttcaaatgtagttgaagttacttgttttcatcaatctccagttgttgcagaaccatttgatcaaaagatttttctttttctactgaattatctaatgccattgttgaaaataagttggccatttacgtatggatcttttttgaactctctgtttttccttctttatgccattctttttcactgaagtttaatagtaaatcttgagattaagtagtgtgagtccaaaattttgttatttcaaggctttatagaggaaggagatggctacactgggtcctttgtatgttcacttaaattttaaaattatcttgtcaatttcctaaaaagcccaaccgagaaattgattttgattacatcaaaactatagataaatttaggggggattgacatcttaacaatgttgagtctgtagttctccatttattaggtcgtctataatttctcatagatgtcttttatggtgtttagtatagaagcataccttgtagttttcaatatagaaacattattaaaatttaacatttaataaactagattaaattgttaaatttatttgttttgttgttttgatgctattgtaaatgaatatgtttaaatttcgttttccagatttgttactattatatgaaaacagtaatattttcacattgcaactgcttttcagttgggttgtcttcttttcagtcttaggagaaaatatgtaatttcttaccattaagaaagatactagctgttatttttttgtagatgcccattaccaaattgagcaagttttattctagtgccagtttgctgttaatttttataataataatgtgataaatttgctgaatgtttttctacatttattaatataatcatgttttcccccttattctcttattatgggagactgcattggtcagcttttgaatgttagcccaacattgcattcttgatgtaatccaattggtcactgttatccttcttgtatatatattactgtattcaatttttctgctagttatttaagagttattcacctatgtccgtgatggccattatcctgtggtttcctttttaaaaattatttttgtcagatgttggcattaggcttcataaaatgtatttagtatagtgctctatttgctagtacacttgacccttgaacaacagacatggagattaggggttcagactcccccatagttgacaatctgtggacaattgtttgctctccagaaacttaactacgaatagcctactgttgactgaaagccttacagataacataactagtcaattaacacatattttatgttatatgtattacatactattttattaacaataaagtgaatgagagataaaatgttattacgagacataaggaagagaaaatatatttactattcgttacgtgaaagtagatgatcataaaggtcttcattctcatttttatgttgaataggctgaggaggaggaagaagaggaggggttgttcttactgtatcggggtggcagaagcagtacacttggtgtaactgtatggaaatatagtttctagcttttttgatttttcatttctctaaaaatgtttctatatggtacagtccttcttccactgtttacttatttgtagtacccacatcatagaaggagccatattgtaaagaagtcaaatgcagacttaaataattagaaaccttctgccagcgtgtttttctggcactccttctgtgtcgtcttccttatcgtctggtactggttcagaagcacttgtctccatcacgtcatcttctgttaattcctctagtgtgttatctattagctcttgaatttctccaaggtgtatatcttgaaagccttcactcaccacccttttttccgtgttcacgatctctttcgtgatttccttggttggctgtattgtaaatcctgtcaagtcatgcacaacatctggacacagtttcctccagcaggggagtgtgttgtgttgggcttgatgctttcacagctttttgtgtaacgatggcatcttcagtgctgtgatccttccagactttcatgatgttctatcagggttctcttgcatagtgttagataatcctttccataaagtactgtgtgtaatgagccttaatggtccttatgactccctgatctagaggatgatttagagatgttatgtctgggggcaaatagaccactttgacaccttcagtattgaactcatggggtcagggacattgtccaatcaaaaaaaaaaactttaaaaggcactcacttactgcaaggtacttcttgacatcagggtcaaaacatcaatgaaaccaatacagaaaaaaagacttcttattgtccaggcctttttgttttacaatcaaaagaccggcagctggtgttttaacttttcccttcgaggctcaggagttagctgctttatagataaggtcagtcctgatcataaacccaattacatttgcacaaaacagtagaattagcccatcccttcctgccttaaatcctggtgctcacttctcttccttactaataaatgtcctttctggcattttttttttttcagagtagggcactttcgtcagtttaaaaacctgttcaggcagatatcctttctcctcaatgattttcttaatggcatctgggaactgcttctcctgcttgactgtttttaagccagacttctttctaaaattatcaaaccatcctttgctggcattaaattctccagatttagaaccttcaccttccttttgcttaggatcatcttgcaccctagaggtatgccttacagcaatcctgtacccgcagaaaagatgcattttcaatagatagatactttgcaaaagtgcaaggttttcacagtgttggtacagctgcaacaatggcttcatgaatttccttttttttttttttttttttaacaattgtcctcacactggatttacttatcttgaaatggcaagtagcccctgctggagacctcaatctgtggtaccttttaagcaattaaacgttttcttgtaatgtcatgactttcctctgcttcttaggagtacttccagtatcaccagtggcacttcatatgggtcccatggtgttaaggtttatggtattacacaagacactatgaaaagtaatatgagaactgtgaaagcttttgttttgctgccacatgcaatttactggagggagaaactgtttcctggcatgatttcgggtcacctggcactttaagcagatgcaattgagctccccactgtagcaaaaggaggtggctacaaaattattacaataatgctgggtgtactacagctaattttatgcagttaggatttaataccacatatttacatttctctcaactgcaaatggcaccatgtaggatctgtgagtatgtgtgagtaggttttgataaattttaactttttataatttgtgtatattttatggtaataaatgataaaaataggctagtatctacatctattttatgcattcatgacatacctttttcttaatttttttggtatttctggactacgcagttgagttttttcaaattgtcacaaatttccaaaaatgtatccaatgtatttattgaaaaaagtctgcatataaatagatcatatgcagttcaaacttgtgctgttcaaaggtcaaatttctttgtggaatgtttgatagaattcattagtgaaatgatctgggcctggagtttccttcgtgatattttaatgaacaatttcagtttatttaataatacaggattgagagtttctgtttcatttaatggcagctttagtactgtttttcaaagagtatagtccattttatcagatttgtcaaattcagtagtataaagttgctcatgatagttccttattacccttatactgtctgtaagatctcacctttccaattctgatataggtaatattattttttctcaggttggtctttttttttttttttttttttaactatcttgtcatttaaaagaatcaatctttgatttgctaattttctctttatctgttttttatattattgatttctttccttcatcttaccttggttttaatatgctcttttttttggtagcttcttaatcttgagactattaagtcttctattatgtaccttacttattttctaatataaccattgaaggctataagcactacattgatagattccacaaactttgatatattgttttaattaccatttaattcaattattttcttcctttgtgttttaatttgatctgttatttttaagtggagtatttaatttccaaatatttggggcttttctgtgtagtttgttacaacttctgttttagttttgttttggttctaaaaagttactctgatatttcagctttccaaatttattgagacttatggtctagcatatgatctgtcttgacaaaagtttcacatgcacaggaatatatatttaaactcaaggtgtgcagattttgttcagatagatagtgtctagattttctagattgtcagtgaatttttacaattgttttataagttacaaagagaatagtgtaaaaaatttctgctgtgattatgattttctttatctttagttctctcagttcttcgtgtatttggaaatatcttattgtttatacttttatgaacatcatgactgtaataaattttatcttttcctaatttggcctgtcttaccttatgtaatatttctggtcttgatgtctgcttcgtctgatatctgaataatattaccagttttcttgggtttgcagtatgtctggtgtatctttttctgttctttaaatctgtcttcatagtgcttccattatagagagcatagagatggatcttttttgtccaatttaaccatcagtgacttttaagtctttggggtcttaagtccctttgcattaaacatactaacgtgactagacttatgcctactatttagctattgtttttccatttgtcccctctagtttgttcctctctgcctgctttgcttcgttcttttgggttaattgaatatttttagtatcctacattaacttctctgtttacatttcggctccacctctgggtattttgtatgggttataaaatgtacccttaatttatgacaatctgcttagagttagtattgtacacttctcatgaagtaaaattttatatatatatatatatatatatatatatatatatatatatatatatatatatatgagggagtctcaatctgtcacccagactggagtgcgggggcatgatctcagctcactgcaacattaggtggaactgtattaactctaaaaggactgtgataatttaaagatgtatattataaccatagaataatcactaaaaagtacagagaaatatagctaaaaaagcaacagcagaattaaaatgtaatagtaaaaatacttgattaaaagaatacaggaaagaatgaagaaaagaacaaagtaaactgtatagaaaacagatggcaaaatggtagacctaaacacagtcatattataaattactttaacggtacacttgtttttcattgctttaattgatcaaatgataggtaaagtattttaaagtctctttgtagttttctttaaatcttaacattttgtgcaatgtttgctttgtgaagattgatgctatgatatttaccaatcatttagaagagatattgctgggtgttttggtaagtttaggttacttacatatcttatatgatgaaatcaacattttttatttgatcaacttaatagaggcatcctgtttgaaagaagaaaataacagatctacaaaattctgattcatgtaataagtaaccattatgataataaatgtttttatttattgagtgcatactgaaaagtggtaggaagattttgtgctgaaatatttgtaaacctagtaattaaaaaatgttttggctgggcttgttggctcacgcctgtaatcccagctctttgggaggccgaggggggtggatcacttgaggtcaggagttcgagttcgagaccagcctggccaatatggtgaaaccctgtctctactaaaaatataaaaattagccaggcatggtggtgcacgcctgtagtcccagctactcgggaggctgagatgggagagtcgcttgaacccaggaagcagaggttgccgtgagtcaagattacaccattgcactccagcctgggtgtcgcagtgagactctgcctcaaaaaaaaaaaaaaaaaaaaagctgctaattaccccatgctaaatgtgttgtaatggtattaatttgatatataacatatatgtaacattttatatatgtgctcatatgatgatactgataatacctccctcaaattgctcttttgagtattaagaaaagtttatatagaaaaaccagtttggaaaggtttggaacataaggctacagtgattagatgttgagaacagcagcaataatagttgtcattataatatctgattaaggcaatatttgcacccaggtataccttgcttcagaactgtgtgattaaccattataccttgaggctattcataccctaccttcactttgttggcataatctgaagttttaaaccataatcacatattgcatttgcacaattaaattttaaaatatatacaaattacagtcaaattattgcattcatttcatgactatattctgtttccatccataagtaccgtatggtcaacaataacatgtcaaagagaattttgttgtcacctcgtttcattgtaccatgttcacactgttctttatctcttttttccattggcagtattgtgttctcaagaagaattattccagaagcacccctgaaataatatatttccttaattttggtattattagcccttctttgcttttctctataaattgtcctgatcagtcacctctctcaattatatacaacacaaagtagcttaaaggagaaaaaaaaggagataaataaccatgttgggtctggcgtcaggcttaatggagtccagtagtccagaatttaaagacacatatgaccgtttgctcccttatctcttagttctccatttcttggtttggcttaaatcttcagtcactttttctttatgtgaatttgcaaagggatcatttgaagccctagatgcaattattacctgccttgcaatcttggtaggatgtgtcctccttccctcctccttgtccatgtaaaagttggtgggtgaagagatggacaaggcttgagtcactaagacattcactgacctgggaataactcaggataggtctggtcatatccccaatggaggcaatgtaccctaatgaaaaggtcagggtcactggtctcattgtccaaggtgttatctgagctcatggtctcacaaccaagaaaattaaggagtatggacacagggtgaggttggttggagcaaaagtttagtaagcgaaagaagaaagctctctgcagcagagaggggagtccaagtggattgccgtttttacagtcattcaaaagcttttttaagaaactcctctcatctctgtagcactttgagtaacttctcttatcagcaaagctgtctgtacaactccccttatcttatgcagctgtgggtatgtctctaggcaagcacaaagcgccgcttatttttgtttgtgtaactgagggtttgttttaggtaagccccctcctttctgtgcaggcttccagggagcccaccatgtacatatctgaaaagggaaggaaactttttgctgggagcttgttaatcatacaaagaataaagggcttccatgccagactttgcctgcctgcttatctatggcttatctgtgcagctatagcctgagtttcccctggctgctctgtttttgcctgtagctgtgattttttcaggcagacagcttctctgaggactagtctcttagctgtttactcaagtaatttttcctgtccttttccctcactatgattaccagctcccctaggacttcatggtctggaatgaaatattccgtgggagtcagggaaagggagtttgttgcaaacatgtccaggccagacactttatataaagtgtcaaagtaaagtacacttacataaagtgtaagtgctgccaccaccactagggtgccaggtactctaacacaagtctttattcccatagatgtgagttaacatttataccaccagctcacactatcaaacaatcccacgtaccccaaataaacactggtgcctggtgggcagcaacaagccctccttcaaggaaggagttcatttgttggtttatccagctgctcccgctttgcttatggaagcgctccgttttctaggggtcttagaagctgtagcagtggtagaaagccccttttttgtggactattatgacttaggcttttatcagagcctcagagaattgctgttgttttgttggttaggctttaggtttccaatctgcatacacaattcctttgaagcaccaggcttccaggcaatttggttgagggaacttattgggatatgaaatattatcaggcaccatttctaatcaatgtacctaagttatgacttcaggtttagagaaaaaaaaaatttttttcccttggcttcaggcttccttctggaggtgataacctcctaaatggactgtctttaagggcctgtggcatgtgccctcctttcaggaaactagtgtatgcctggaggcattggtaatggcttctctcatcttactgtggcttgggaagaatatggctattgcagattttctagtttcattaccacctgaccttcaggctccttacatgttataggcagaaaaggtgcctccacaaagttgtgggctattctctgctttcagaaggacagctggaaatggtacttaattctttgtagcagcaccatcatgaatagctgcccacacccatatacatcattatcttttttggtgaagactctaagacttcaggccatgatatccacaaggctatgttcatgcactacttcggtataatctcaaaataattgccagctccccagtggaacgcctgccttggtccatgtggaatgtgggcatatggtaggatttccttggaggaactagaagaggaacataaagaatgttaggcatataaattattgtttctttttcttcttgtttctttccactgagttatgtgtgagcccccacacccaccctaccttcctgtcctctaccttactgatgctattttcaggctgttgtagaattgggtgtgtaaaattaaattagcctttctcctcttaatatctgtaaaatgaacaaatttgacaaagaaactacctatctgatatataagaaggttattagcctgtaccacaagtgaaaaagtttcatcctgatatatcaaaatagtaccacttgaaggaaaacgttggggccatctgtttctctcattgtagttagagtacagatttttaaaatatgagcctcaggcataaaaatgcagtattagcaactcaacttgaagaagcagttactagtgtcctgggtgggccccagggaaaatagtaccaactgcctgttatatttaactgcaattaaaaatggcagtgctgggtatcttctgtctctgggtcatctcctaaagatcctgcagagggagccatagctagtgtagaggccagccataactagccatggcaaagaccacagggaacgctcttcaacatgctctgcactgatcctctaccctggtgtggagaaatgtcagattcatcactaacaaggttaaaggtgtaaattgagggaaaaaaatgagaaaagttatctttcacataagacttcagaaagaaattgcgtcgtcaggtttggaactggtttgtaatttcatccagttattttcattttaattactgtcactgttttcttcatccttgataaactatgagctctttgagattgtctttttcatatcctgatgtcagagcttcctgtattttctgatcatggtatgtgctaagtaaatgcaatttttagcattttgaatggtttatcaaatgattgaaggagtgggtaataatatagattacatatacagtcagccacatatgtgtatgtatgtgtatttgtgtgtgtgtgtgtatatgtatatactgttgaccctccgtatcaatgggtttcacatttgtggattcatccaatcatggatcaaaaatattctttaaaaatatggttgcatctgtactgaacaggcacaaactttttttcttatcattattccctaaacaatgcagtatgacaactatttatcatagcattgacactgcattagatatgataagtaatctagagattaaagtatataggaggatgcatgtggatcatatgcaaataatacactacatcttatataagggacttgaacatccatggagtttggtatgtggtgggtgatacctcctctttgaggaggtgagtatcagagacgcaggtaaatatgatccagagggcaaagaggcattgccagcctcacactggctgtcaacaccatgctgagttccacgaaagcagcgaggagagggtggtgttcttgtttctggtacaatacctggcatagagaagatgtcacagcaatgttcgtctattgaataagtcaccaaaattgtgaatgactgaataaatgggcaaagggatttgttccctacttgctgtgggaagtttcttgtagttatgacctccatgaaagagagactcgtatctggagaaagttcatagctgaaaccatgagatttaacttttgaagttataatggatctatttttttaacatcataaatgaagattatgcaatactgtatgtgcttcaattgacacaaccccttcccattcagggctgatttatgttctgtactgaatgacaggcacagaagtaaatgtgataatcctgtcccgtcgttaccctttattgtggtcttgctgtgtcccagccacacacttcatactgtatctgtgtcatcattctcatatacatctatataggtacacttccatagacttaggcccatttaatggaggagcaactccaacatttagagatcatgaaaggtacctcatgacatatattgacctagtggcagagctgcttagttctacagcctctgagtggaatcctcacgacagtaaaaacacaagcttggtttctcacacactctacctgctttttctcatcccctttagtctctattccttgctgagatgtgttaggcattaaatggttacagtctacttctgtgtgtagtctccaaacactcagaaacctcaaaatttaaaaaaatacagaacaatatgttattaaataatcagggacaagttaaaatggtaaagagaataggccactttgtgaaatcatatgcagggaagaaaaaaatactggagtgaaaacaatataaaaataatactagatgctgtttcgtagcaccaagtgtgttctagcttctgtggttgttgctttatatcattttatataatctttacacaaaacctacaagcagatattatttcccctatttcaaaaatgagaaaaccaaggcaaatagttggtaagtagtacatatatattatcctaactctgaacttctggattcaaagaccatgttctaggataccattttgtgtaccagcatggaatatgtttttagttcatctatttactctaaaaatgtggagcatgtagtgtgagacagaactgttctaggctgtgaggaagtagctgtgaggatggtagtatgggtccctgtaataatgaaaatggaatatattggtatgtacaagtacatgctcattaaaggaaattgatgttggcatagattgcctgggttcaaattcccatttaccatgttttcctagttgtctctgtggtgagaggaggtggaatgtactagccattaccaaaattaagagagattgttggaaaaagtctcatttagcacaataacacattaaatgtattcaataaatgttacttatgactctttgagaaaacatacgtttaaaaaacatggcttatgttacacatactatatgctggctcccaaaaataaacatatttcccaagaagtgtctgttgataaagccaaatatattcttactacactaaggggaagcccatcttagcagtgtctcagcagcatattaggggcgtgggggacaaaacaggatatctgggatcttgaagtttcattttagatgggtctttcagtgtgggagcttgattaggattgggtgagggtcatgacacagcattttaagattgaacgttaggattttgagatgagggattctacagtgtggaggcataagctgtggtctgatgctttctgttgatgagttgatggtctttgggaagttcccaggatgaacaaaaatatttgcaacttttatcttcctgggcaagagtctcagaacatctacacttatatcaatgaaggtaaaatgataataatgtccccagcgaagacaggaagccatgtgggtagataatgtaagttgtgtcatttcatggttccatggataagcagctgtacttaagctgcttatcctggtggattctggagatccacacttgaaggtatcaacacagaaatatactaagaggattgtggtcagagtttgttgtcagctactgagtgaggagccaggaacatacagcttttaccaagaaaatctataccatccacactgtgatgagcccacaagaccagatatgggactttagccaaattacctaattttattatgtctttgattgctttctggtccttatctgggatatcagagatcccagagagatggcagggatgcaaattaaacattcttcccccaaaaacaacacatttttcccttataaaattactatattctgaaaaatttcatgaacctccaagtcaagatggggcattgtctaacttgcctgctgtttgctatacaatagcatggagtcagctccaggcttcccaaccctttcgaaaagcatgaattgaagaggcttaaggagagaagaaagcaacccagaattccctgtgtggttacagtttgggttcttgcctcaaggcctggtttttctctttttggagtaaagttatctgaagacctctttttctaagagaagaaactaatgggtcaaaatggaccctgggggatgtcagggactacagtgaaggcagacgttagttcacccctgaaataaatttctgtccagtgtgcagacagtagccagcagacctttgtctccatcatccaataccagtcttttcagatctagtcaatgatctatttaaagccaaaatatccttatgagactgtcaaatagtattgtatttttttgtatcactcgtcaagaatagcttagtacccggcaataaattttatagtactgatattaatagatctcaggtgaaagaaaagtcatgtgtcttataagatgggtgaaagccacctccaaatagatactctgttctctagttgtttttcatgttctattcctctgtaagttcagttacaaaagctgacttccacaaaaagttctccagtattgttttggaaccttattttctaatatcttgtcatatacgagttgagtcccaattaatgattcattatgaggaactggaaacgagaaactgagtggctcaccaaggaaaatatgtgcaaacctaacggacaatttggttatatgatttaaccactgcatgcataaattataactaggtattggactcatactgaggagtgattaaaatgtaactatgccttataagcaacataattaaatgtagctttaagccagataggcaagaaaataacaaaaggacgcagattaaaacatgacaatatatggtattgttctatgagtcttgagtggaaactctacatttcatgcagtcatctacttgggctaaaaatcatgtgtagtggccatctccttccaaagaccatcttacttctaatgagttctcattgaggtctcacgttctcagtctgaggtctccaggtctcaagatttctcagcttgaggtctccagtaatgatttaagatggtttatgcctctttgattggaagacatcactctcagtatcaactccctggaattttacttctggatgagtcgttaacagtatccgatagggtcttttccatcagggttcgagggctttctttctcaggtatctctcctggagatacctgagaccaagcctctgaatttagaccatgtgagggtcatttagtagaggaaaagctgcttgtttacctcttaataagactggataaattgcctgagttacctgcaatatttggctgtgatcacttccaataatgtagagtctagaagcagaggagatattcctagactcgtgggttggcctgttgctaactcaaaagggaagatttgatgaaccccagaagttgagctcattgtcattaaagcaaacattaggccatgtgagtttgagagtctttgatagttttgctaatttgagcttaaactttttgtttattctttctatatttcctgaagattagagtaatatggacagcagcgtttctgtgtggactggcagagctgtacaaagctctttatcatctcagtaaaatggagatagtttatacttgtactagagagagagtttgggaacataaaatcatgtcaaattttgctctggcagagctggaaatctccaaacaaggcctcaatctatcctccaaataagcgaacaattaccatacatactcaaaacccattgcagaaggtacttacaaaatctgtaagtgttctaaggggccctgagattcttgttcatgccccatctttgcatttttaccaagattatactggtaacaaataagacaccgcatgcaacctcaataatcttagtgaaatttctccatcaatgttgattgagtgcagtagccaatttttctttgcttaggtagttaattgcatattaaatgtttgaaacatcccgtttaaggtcctctggcgctactaagcatctatcctagagtgtgagagattttcctcttgcaatttacctgcagatttatattagtaacggtttgccaactgtggaaccaattgttgacattctataagaacctgtttgaacccgtcagaaggtttgattatgaggaccaggatcttagtgagggctccatgctggggcctcctggtatccccatcttgtattagtgtttgtttttttaatagccacatctttagcaagctttacaatactcaaaagttcttttatttgctgaccatttttagtagaggctcctgctgagattgagaactctgtttgttcacaaacaagaccaagaactacacacaaagcatacctgccaccagcactctcctatctcactcaaactgaccagatctgtagagcgaaatgagtcctgtcatctggcagattttgcctctggtagtgattataagggtgaagtatgtcacatcatgtgccatctgatattcttttgtcccagtcttaaagtacagcacatcaaagaacaagatgaaacatggatttttaaaaagagattactaatacatctatttagggcatagtttgtaaacaaagacagtacacagcttcttcttaaggtaatggaaaaagtagcaattttgaaagtattgccataagtaataaagatgtgaggtgctgatgtgaagtaatatttcataggaatttaagcctctatgctgaaaagtatgtattttcaattttgtgtattttcagtaaaggttatccagcaagagggactatgaaacttaaaggagaccctaacctaaaccaagccagcagaggcttccagtaatttagctgttgtggctattgccactgggtgaagatacagacttcaatgagctggcccctgaggattctcctgaaatgcatttagaacaccaagagcttatccccagcactcatatacaaactggtagagagttctgtgataattaggtaggcctaaagtgggaggtcattggaaggctaattttaactcacaaaaatctctttgtgattaggttcttagggctcagttttggctactcataaagtgggtaagtcagagagatgggaaattttggaaaattttggaatgttctgcaataagcatccaaggaaacccaggaatcctcttaatgatctcttaactactagcctgaaaagttttggatagcttataatctatcaggcataaaggattcatcttcttgggataaatcacatcataggtaacgaacttaaacaaaattctaacttctctttggaaattgtatgacctttctgagctaaaacaaagtagataggtagaataagtcttagaacttgctttgtctttagaacacagtcactggtcattcatattatctattgataagagtggaatcacagaaatttagggtccttgaaatcgttgtgaaaagtaggaaggtatctaagtaaatccaggggatatagtacaagtatgctgttgattttgcctagggtgtaccaacaagtatagagtattttaatacaaaggcactataacaaaaaagtagaacacaaatctgccactataagatatgcagcctcaaggactcagtggaaataagatggtatttgggtggggtatgataaacagcgattattctatttatggttctgaagtcctgaaaaaatctgctatctctgccactgggtttttgagcatggagtgtaaaagaattataagggctgttacaaagtttttagctattattttagtcctttagtcctttttaatctcttggttttagaagagattgtgcaagttgggtagcagttaaggtggataaatctgagtcttaaccgggtttatccataagaatgtcaagcacttccttgagatcttcaattttggcttgatttagattcaatagtagtcgtgaatcaatgtccagattatctatggtttctttatgagtgagggagtcagagactcaaggtctagaccatccagatagcatttaatttacagttccacccacgtagtaacttcctacctatcatgtgagtgaatatggtattacagagaaagaaagagtgtaatttagttaaagtccaagggtggctgtaatgggctgggatgtgaggaatatttgataattattgcagaaacctaccatgtgagtagtttattttcaatgaagaggttgtgtaatagtgataaggtttaaggttgatgatatttagcacccatatcagttaaaaaaatttgcagagttgtcatttaatatttagagaaagttttctttttgacttgaaagatgaaatgttttgtgcttgatacccaccggaagcaccttgatttgtcacttatttcatgttttgccctttgattctgagctaatgcaaaacaagtgttttccaatttccttactgcttacaggcgtctttatcaagagacttccttattccgggtttaatgtctgggataggaggatgtaattttatctctactttgattttttttaatgaaactctttcaaaatgtttagtgaggtgctagagatctgataatgggaataatattgctcattgtagtttttttttacatattaaatcctgtttttttggcttcagttcctttctgcaaaatggggaaagatgtgtgtgggctcatatctgcttcaaggtctactgagtccttcctaagggtattaaagagcctatcttcaatttctccaatggacacatcctttctttgcttgcaggactggattataaaacaatctattttcacagggaagactttaggggtagtctccaaaagaccttgtccaatatcttcagtttttctaaaattctttgtttcctgtaaaatttgaaactctttggtttcctgtggtcttttatgtcaccactgagactgacccattttgcctttttcatgtacttttttgcatctagggttatcactaaaatatgaactccttggtatagatttgggagccctggattctaacttcctaaagatgttttataatcctcgcaagttttcctctattctgcctgtgctttgaagagcctttgacggggtctctcatctcagagttagatggcttaaaatcaaccacagatgtttccctgttgtgagggtagtttaacatgaagaggtcattgagctttggggttttctggctgtctgaaagagaagaaaaattgttcagagggagagatgggggagagaataataataggataaagtctatttggtttgagttatgatttgttggtatctaaaacagagagagagttttttttttcttttgccctggctaacaaatttcataagaaagcagttttgaaatctgaattgcctttggatgtttctcagattaattaaaaatgtagactactggatgtttgaaattttgatctatttttattttaatgtactcttaaaaaattttgttcatagaaaaacttcccccaaagtggctgctataattgtaactcatctctgttgaaattatgccatttaaataagtatatgaatgtggattatcttataaacatatggaagaagaagtccagagggcgtttggaattagaatgagactggaggcataccctgaaagtgtggtaaaactctgaaaaaaatgttgcttatgaccccttgggtctctcaacctgatttctacattgtctaactgtagacctgaaggaatttgcagtttcttgggggtacataagatgttaataggggatttctcttagaaccagactgatgatcaagacaagattgaggaaaattgtcataggttttgataaggacctagggaaaaatttctccaaaggacagcaggctgagaagaaatcttacaaacttctccatccctggggctgtcttgagggatccacttacctgggtctctctcactctcttccctatgaacattccttatatatacacatgaagtggcaaagacaaaggcgaagagtagcatcactagtaataaggcagtttcaccaaagataaatttttttcaagtctgatcaaagtgttcctgaaaagagttccttacccttaggagacaaaataatctcagtatactgggagttcaatgaaaatatactggggctcagtccaatttgatttacttaatacactgttgcactaagagatagtcctgaccaggaagctaaaaggatatctgaggaggacaatgaattaaggttctgaattaaggttcttgtgcctaggctgcaaagaggtctcaatctttatggatcttggtgagatctccaagattgttcaatactgaattcctagaaatacaacctgaagaatattttgataaggcaaagctgagtttattcttaatgtggtaagagaaagcaatcccctaatagatattaataacattttggacaaggaaggacaaagttagaatatttatgagactttaaaggctcatttaagatgggtctttaaatgccagggcttgattaggatttggcgaggattatgataaaagagtttactgttggtggacacagcaaagtaaagatttggaggtgagggattcaaaaactcttagaatataagctattgtctgatgttttctactgatgagttaataagtttctaaggaagttcttgtaataaataataaacattattcacaacttttatttttctgagcaagaatttactggaatagtaaagtgaaaatagtgccagtgaaaatagtggaaaatttaaattggaggcaattagccatgagagtgtacatgattttgtttctcacagtgtcagttaacatttcccctctgtgcaaatccttcaatagtttacaatttgtttataataaatgtccgtagaatggcccacaaaactggacctggtcaagccactttctgtcacctcttacctcttagctactacttgctgttctggaaccactgggccagcttctgcaccagattctctcttggccccaagcatttttccaccgtctctctctctctgcttactcctctgccatcatcagttgtcaactaggctaacctggtacacttctctaagtatcaatatcactacaatgttgctctttacccctttccactattttcaacactgatcatgtaatataaaatattatttaatattttaaatgattatccatctccttgcactagaatgtaaacatgctgactgtagagatttttgtctttgtcttttactgctccaacaccaattctctgactttgaaggcaataaaaactgactttaaacctgaaaagaaagagctaaattgccttccagttctttgaagtaaaagtttatacttcaaaagaattgctctggaaagggagaaactgcaagagaaatttcaacttcttgcttctcaaagagaaaggcaaaattatataaaattttgaggaagggtggcatttaggttaaatttataataaacagtatagctgggttagatggaagcaaatggagttggtcagatggggttgatttgatcaaagccaagtggaaatgattggaaggattagagagcagaccagtacaagcagtgcttgctgatgtggacatttaagtgaaaactcattttgaccaattttgcagcttcctgagtatggggtgaggatatcctgttctttaggggataataagattttcagcttcttttgtacatgtgatgatgcctttaggcaagggtgatatttttcattctcatgaccaaagcacagaccataagtctgaacacagaacactatacatggtaatctaggtactctatttgcctttgtaggtgattgcaattttttccttatttaaaattttaagaccataaagaatacttgaaaagtaactttttaccaatcatttaaaaaatactgattaaatgataaaatcccttaaaaacacagttaatgcaaaagccacaaaaagaaatataaaatatagctttacatctgttaaagacactgaacacataattaaaatattcccaaacaacaatgctccatgctgaaatgttccactagtaaatttttacaaatatttaagggaaaaatgtataattttcattttctcaggatagctgacttctagtaactaaacatgacaaagaactataaaaattgaatttacagaacatggctactaggaatatagatccaagtagcctgaacacaataatagtaaatcaaattatgtgaatttttttttttttgagatggagtcttgctctcttgcccatgttggagtgcagtggcacgatctctgctcactacaaccttacaacctccacatcccaggttcaagtgatcctcctgcctcagccccactagtagctgggattacaggcacttgccaccatgccagtttaatttttgtatttttagtagagacagggttttgccatgctggccaggctggtcttgaactcccgacctcaggtgatccacctgcctcggcctcccaaagtgctgggattataggcatgagccaccgcacccagccaaaatatttttttaaaaggtcactgcattataatcatttggggtttacttgagaaatgaagattttttttttaaacattcaaaaaatcattcaacacttctggtttcagctctgatatgtgaggaacttgtaagttataattactgtccttataacaagataaagcagaacaaattgaaaaaaaaatcaattatttcctttaacccatcagagaactgaggcttcagggaaagttgccaccccaaagtctggggacaccgattgatacacagctgaaatttgcttagctggaacagaagccactggagccacaaattgataggaacatttaaatagcaatttagatgaatagctgggctgaatgtgggctagagtgaaaggaagaaactcctgggaacccccacatttttgtgggttctacctccagaacctcaacaatttctcatggtaaagatttaagaaagatcccctcctcctttggaaagggagagaagagtaatcattgtgaaatacacccagagcattcttcataacaaagacctaacctccaggggaaaaattttatctgagccatatctcagtaagggataaggggaagggcattcctttcatttcagccttctctagctttcctgttttaccaatcaggaaataaaaaacccacaattgtcaatagagatcagcacttcaaggaaatagattggaagcaaaagaaggagggaaaagagtagagaggtcaggtggagttgagggagaggttctgccactgaaggaatgtttgtgatggttgtaacaccaagacacaggcacacagagacttattcaaaagatcatagaacactctcccctatgtcttacgaccccaccagcagtgttctgtgtaatagtagattacagttgaaatagctgtaagacaccaattctctcagaggagtacttagggaagtccaaagtcaagagcagaaacaaaagacactagaggaatttggcatttctggtgcctctagtaacagcaaacattaaacaaagcccaattcctcatcagatttctgtaaatagcattctaaagctccatttacctcagtacttactaccagatacagttcaacaaaaaattacaatgcacatcctatgacaagaaaaaacagtctgaagagagaaagcaattagcagaaccagactcagaacaaagatgttggaattaataatagagatttaaaataactatgattaatatgttaaggactcttagacatgcaaaaatagattatataagcagagagatggaaactcaaaagaagcaagaggaaatgctagaaataaaaaacactataacataaatgaagaatgccttcaacaggctcgtaagtagattcagcacagccgaggaaagattcagtgatcttgaagttaggtcaatagaaattttgcaaactaaaatgcaaatacagaaaaagaaaagaatgaagaaaatgggacagaacatccaagaactgtggaacaatttttaaaggtgcaacatagatgtaatggggatactaaaagaatggagtatagagcataatatatgtttgaagtaaaaatggccaagaatttttcaaaattaataacagacaccaaaccacaggcccagaaatctcagagaacacaaaacagtaaaaatgcaaaaaaagcaaaaacaaaaacaataaaacctacaaatatcatattcaacctgcggaaagacaaacacagaaaaagaaatctttaaagaaggtagataaaacatcctcgtcttctcatcaggaaaaaaaatccgaaagtagtaatgtggtagtcaattatggcatatggatgtgtgaaaacaatggcagcaatgccaccagagataggaaaaaaaatggaaatcctctgttataaggcacctgcactaagcgtgaagtggtatggtgtaatttgaagatgggtttagattagttaaaaatgtatattgtagccagggtgacatagcaaaacccagtcttaactaacaatacaaaaattagccaggtgtggtggcacacatctgtagttccagctacttgggaggctgaggtgggaaagttgcttgagcccgggaggcagaggttgcagtgagccgagattgcacccctgtactccagcctgggtgatacagcaagaccctgtctcaaaacaaacaaacaaacagaaatgtatattgtaagttctagctcaaccagttaaacaaataagaaaagataattgatatgctaagaaaggagataaaatggaatcatgtaacatgatcaagtaaaagtagagaacacagtaaaatagaggtcttaaagaaatagtaatgcaatgactagaaagcagttgcaaacatggaatatattgatccaactgtataaataatcacttcagatgtgaattatctacattgaaaaacagaaactctcagaatggactaagacaagaccaaactaaatggctacaagaagcctactttaaaattaaagatttggatactctgaaagtaaagggatggagaaagatataacatgcttacagtaatcaaaagacagctggagtagctatattgattttcagacacagcagaattcagaacaaggaaggttaccaggcatgaaaagtggcaatacatagtgagaaagggccaattctacaagaatatctaaacgtgtatgcacctattaacagtgtcaagatatacatgaggtaaaagttgataaaactgaaaaaagaaatagataaaccctatttatagtcagaggttccaacatccctctggcatagacataaataagaatattgataacctgaacagcattatcagttaagttgtttgatgtttatagagtactccaacaacagaagaatttacatgaatatacattattccaaagtttacatgaaatattcatgaaaacatcatattatgtgccataaaacaaatttaaaagattataaatcatactaagtactcaggtcacaatgtaataaaactagaaaccaataaagaaagacatagctgggaaatctccaaatatttggaaactaaacaacaaacttgtatataatagacacatcaaagaacaagtcattagagaaattaaaaattattttgaactaattccagctggacaatactggttacaatttgtgggatgcagctaaagtagtgcttgcaaggaaatttttagcattaaatacattaaaaagaaaaagaccaataatcaatctgaccttccaccttagaaaaatacagaacagtttaagcaaacagaagaaccttaagcaaacagaagacaagaaataataaaagaataaaaatcaatgaaatttaaaacagaaaaacagtatggaaaaccaagaaaaccaaaagttgatttgtttaaaagattggtaacattgctaaacttctagtcaggctaagcaaagaaaagaaaaaagacaaatgaccaatatcaggagtaaaggaggggacatcagtattgatcccatggacgtgaaaaggataacagaatactaagaacaactctatgcctccagatttgataaatgaaatggaccaataccttgaagtaaactaccacaacctccaaaaggaaaaataggtaacctgaatagcaatatatctattaatgaaattgaaataataattaaccttcccccaaaatagcaccatgcccagagagttttactagtgatttttactaaacatttaaggaagatgcaataccagttctccaccattacttccagaaaatagaaacagagggaagacttcccaactcattacatcacaccatcattaccctaacataataaccagataaaaacattaaaagaaagaaaaactacagaccaatatctctcatgaagattgacgtaaaactccttgacaaaatattatcaaatcgaattcaacaatgtatagaaaaaattagtaccattatgtacattatgggatttattccaggtatgcaaggctctttgaacattcaaaattcagccaatgtagtagaccgtatcaatagcctacagaagaaaaattatattattatatcaatagatgcagtaaaagcatttcacaaaattgaatattcatgatttttaaaatctcagcaatctaggaatacaaggaaatttcctcaacttgatgaaaaaattctacaaaaaaccccatagctaatatcatactgaaatgtaagagactgtatgttaatttcaggagcaaggcgaggatgtcctccaattctatgcaacatcatactggaagtcttagctagtgcaacaagacaagaaaagggaatgaggcatacagattgtgatggaagaaataaaacagtctttactcaaggatgacatggagaaaatcccaaagaatccacaaaagaaaaacttggagctaataagtgagtataacaaagttaaaggatataaggttgatatacaaaaaccaattgcttacctataaaccagtaatagtctattgaaattagaaaaaaactataatagcaccataacaaaagcaaataaaacccttacttataaacctaaagaaaaacaggttcaggatctatatgtctatatgtagaagactataaaactttgataagagaaatcaaagaagatcaaaataaatgaacagatatatcctgtatccatagatagaagactcaatattataaaaatgtcagttcttcctaactttatagactcaattcaattctattcaaaatcccagcaggctattttgtagatgttgacaaagaataaccaacataacactgaagaagcacaaagacagaggagaaatactacctgattttaagacttttactagaagctgcagtaatcaagactttgtggtactggcaaaagaacagatacataagttaatagtacagaatagagagcccagaaatagacaccacacaaatataattaactgacctgtgtcagggaacaaagacaatccaatgcataaaagaatagtcttttcagttaatggtgctgcaacaaggagatgtctgtatgtgaaaaagtgaacctagacataggttttagatatttcacaaaaattaactcaaaatagaccatagaactaaatatgaaatgcaaagtgttaataattctaaaagaatacaagagaaaatgtatttgatcttgggttttgtgatggggaacaccaaagacacagaccatgaagggaaaaaaatggtaagcttttaaaatataagttctgtttggaaaaaggcacttaattaaaagataagccacagattgggggaaaatattttcaaagtacatatctaataaaggtattctagtcaactgtatagagaactcttaaaactcagcaataagaaaacaaatgaccaattaaaaaataggcaaaagatctgaacagacaccataccaaaaaacaaaaacaaatacaaatgataaatacacttatgtaaagatgcttaacattttctgtcactggagataaaaaataataaaataccactacacatgtactcatatacatgtacacagtacacatatacactacacacagtacacatgtattcccatgtaatagaatggctaaaatccatccaaagcctgatcatgccaacttctgttgaaaaggcaagcaacattaattggtgatggaaatgcaaaatagcacagccacttttgaagacagtttggcagtttcttagaaagctaaatgttgtcctgccatatatctagccactacgctccttggtatttacccaactaatctgaaaacttacgtccacataaatgccagcacatgaatattacagctttattcataatgaccaaaacctgaaattaactaaaatatcattcaataggtggatggataaactgtgatacatttatacaatagaatactatcaagcaataaaaaggattaacccatcaagccacacaaaaacatggataaatcatagatgcatattgctgagtaaaagaagccaatctgaaaagaatacatacaatattcttcatttttgtaacattctgggcaaggcaaaactatagatatcaatggttggcagggttcaggcgaaggggcagggatttaatagataaatcacagcaaatctattctgtatggtactgtaatagtgtatacattatactgtgcgtttgtcaaaacacagtgaactttaaagcacaaatgaaccttaatgtacacaaattttaaaaaatcatttaggagtttgggggatccaagatggaacacagtgtctgacaaaagaatccaggtgttttacaaatgtattagacaagcttacgaataatgttggggagaaaagataatgacttaagtaactttgaaaatgagtggaatctgttaagactagaggcaaagtgactgtacaggagcactgcacactatttgataaagttgttttctgtaggtgtatgagttagcaattctaaatcatgatacatatgtatattggaattgaacaattaagtaaatggttggcagatggtgtacattttcttattgttggaatgaaaagttacagacaagaagaaaagaatgatttgtgttgtaatggattagagttggaaacgtcagtgtaaacttatgtttagtttaatatgcagacagatggttacacatagaaatatagatgcatgtatttacatagttattgtacacaccctgtgtcaactgagaatgcttagaagcaatgacactctagtaacaatgggcacacctagaacccagcccttagtttctaataccattctccaatagaacaaatcagggatccttgtagaaatggctgattctaagactggttaggaaatgtacaagatgagcctggagcatcatatagtgccagagagtaaggaagtactaaaacaagaaccccacattgatgaaagtatatcaaagggactcaggaaccaaccaaaagagcttccagtggtcaaatctggaacaaatttttaaaaataaatagcataatattagattacaacccaaagtataaaatatccatgaatccatattgatgtaaataatcaaatgaataaataaactggggagaacatagattttttgtgcagaataatttcatatagtttttatagatacttttgcccttaaggaggttgaactccttactcgtcaagtgtgggaagaaagtcattaggcacattggtgactttctttcaaagagtacagggtggaaatgggggatggaagggaagagtaactgtgcaggggagaaacctgacaagcactatctctacatggtaatcaaggttaacatcagtagtgataaatcatgctgatagtatatacctttgatatgacgtgataaaaattgcactttacctctacagtcttcctcccaaaaacccataagatcagtatcattatgagaaaaatcatcaaacaaatcccacatgagatatactctacaaaatacttgactagttttgctcaaaactgtgaaggtcctcaaaaaggaaagcttgagaaagtgtgacagtcaagaagagcctaaatagacaagacaactaaatggaatatggcatcctatatgggatcctagaagagtaatagtacattatgtaaaactatggaaatctgaataaagtgggctttagttaataataatctatcaatattggttcgttgagtgtgacaaatgtgccatattaatacaagatgttaacaggaggggaaactgggtatagggtatttgggaactctgtttcagcttcactttttaaaaaatcttcaaatgtttacttcaaaaatgaattcaaaatcactcaatgtaaatcactatggtaacataagagagaagaaaagttatatgatcatctcaaaagagaaaaagcatttgataaaatataaaaactattctttataaatctctttattggaactacgaatttatgggaactaaaaattgaaaaaaatttaatgagataaagggtatttacaaaataaattaattgtaaaattattgacagtggagatagagaaagcttttttatgagattgggaataaaagaggattttttttcatcatttctattcattactatactggatgtcctaactaggggagtagagtcatagaataaggattggaaatggaaaggtataagtttcattatttactgacaagaaacaagtctgaacatgatcaattaaaattaggaagttaattgagcaagattgctgggttaaaaagcagataactaaaatgtatttctatgtaaaatgacaaatgaaaaatgaagtttttaaaagataacatttttgggaacatcagaaacatcaattccataggaaaaaattcacacaaaatattatgaaacattatggaaaggaagcaagtaataccttacaaatggagggatataatatattcacagtggcaaattcaattacatatactatacatgttaattctcccccaaattcacttaaagatcccaacgtaagagcattctaaatctgaatgccatttattaaatgttcaatctaatttcaagaattatatatgacacaaaaagtcaagaagagccaagatagtcttgatgaagatgacaattttgcatgagttacatggccaaaatttaaggcctactattgcaaggttacagttactgacaaaagacagaaaactagcctaatggagcaaaatagagactccactccacaagcagatcaatagatatatgattacttgctttatgataaaagtgccactcctgcatgatgaggaaagaatggtttgttcaatagttagtgctggatatcaatacataaaaaagtgaattccttttcaaaccatacagatccatcatttctaggtgtaatgttggtctattcatgaaaggcaaaacagtaaagcttcttgagcatagcataacataggagggtgtcatcataatttggcagaaagtgaaaaataccaataacactaagcataaaggaaaatattgatgaattagtctgcatccaaattaaaatttttatttctcaaagtatataatcagtgaagaagcatcgtataaaagatacaacttgtacatgtcaaaaagttagaaaacacttaaatgggtacttcacaaaagaggatatctgaatggccaataagcctatgaaaaggtattcaaggtcattagccatgagaaaaataattcagacaacaatcagataaacatcttccagtatatctagacagtccccaatttataatggtttgatttatgatttttccactttatgatgttgtgaaagtggtatgcattcagtagaaaccataccttggattttgaattttcatttcccgggctagccactggcagtatgatactctagtgaggctaggcagcagcagtgagccatagctcctagcagtcatgcagttatgaaggtaaacaaccaatacttcatcgcgtactgtgctgccaccattttgacccactgtaggctaatgtaagtgttctgagcacatttaaggtaggctaggcaaagctatgatgttcagtacattaggtgtactaaaagcattttttatttacagtgtttttaacttatagtaggtttattaggaggtaactccttcataaatcaaggatcatctgtttaaaatttgaaagtgtgtgttttttagaattctcttagtattcactgaagttgaatggaggcaacatactctcaggtatatggttaacaaaaattcatgcatgattgacccaaaatatgtatacatgaatgcttatcatggtgccatatctaatagcaaaaattgaaaacaaagtgcccaggaggagttgaaggataagtaaaccttaaaatatgcacatattctctcaaggaacgtggatagtattgtgactgattcttctccatgtgtgatccacatagatgataagatcatcatgagaagaacttaattttatacttgagctttgctttgactgaaagatgagaaattttgtgattattggtatcatctctatgatgtcatattacctagattcacatattcttaactccattaaaatagaaattatatttgtgggcggggaacttattttcatccatctctgtttccttccaattgagcaattccttattttatgttaacctgattttagtggttcattgccataattcttagaaattatatctcattttttcctgtgattttactgtattgaagtaaatctggttggcaggatatacaatattacatgaatgaaatttgcctttggtaactgagaaagttcaaatagaccttggttctagcgaagacttgtttctaaggaatttagattcattctttcagacagtatgaatatcattatggggtcttcttcatgagttatgtatgtgatgggattcttgtaagattttcaccttttacctgagcttgccttgactgaaagttgagaaaattttgtgattcattggtataatttctacagtgcaatatttatttggatctaagcatgcaagtaaaaaaattcatccctgttatagtatttcaggtttgcagtacgttatgacatttgtagatcattgatggactatgaatattcaagggacctggcaattgtacccaggggattgagatccagatacttgtttgtttgcccatagatataaaattaggagcttcctgatatctaatttacttttttaggaataacacccatgagatacagttctcatctactgccctactcctgtccttagataaataacaccggaagaagaagactctctggcctcttacatcagggacacatgaaaagccacactgaatatgtatgaactccaatatactttcacagaagggtttaaggatgccatccctggttataatttttaggaccaaatatatatatatatacacacatacacacacatttaggatagatatatatttaggatatataggataaatatatatatttagtgccatggtttgggtcatgaggaggtttgatgacataaaaattatgctcataagtattatgctgagacccattcttgggaggagatgtgggggtgtcctaggctgtgcaaaacatagctatggaaacagaagttattaagagaaaagaacaagcagtcagtgagaatttagataagagactgtaatagaataaaagtatcagattagtgaatggttgtcctagtaatttggaagaaaaggaataaaaaatggagtcagactactaaatggcaaaaataaagacttgaagaacttaattttatacctgagctttgctttgattgaaagttgagaaatcttgtgatttgtcggtatcatcatctcaaatcaacttatttttcatctcaacatgaagaatatcagctctagccttttggaatttcagcaactcagatgcttgttagaacttatccaggactgcttgcaggacccaaaatactaataatccatatgcctttttttccagctgaaattagctgtcttaagagttgtttttcagtgctctgaggatatccacaaatatatcccaaggcactctgaagtgtgttttcaatctttggccctgcacactggggatgcccactggatgttgcatggagtgttgcctccagttgactttgatagacacaataaacaccacgtgagagccccctcatgaaggagggctgaggacttggagtccaattctccacctcccctgacagataggctattcaatgccttgggaatccgacatgaaggactgcttatagcagtccttgaaaactttctacagaatgtgaactgggagaagctaaatgctgtactcacaagctgggtgacttctccattgatttttaccatagctcactgaaacattttctaaattaacaggtataaattcacagacagatcagaatagatccttggtcctttccatttttctggcacttttgttgccaggaattcaaatacaactaagagaaaaagtgggtagctagcaagaacagatagtttctcaaatattagtggcagtaacccaactttgagaaaatatggagaaagagaagaaaaaacccttaagactgcagtgttagctgcccagttacaattattcacaaagtgagcaaatacttatttgggccaccaataaataagagggcacaagctaacgggaaattaatacgtcactcatgtaaaaagtcaacacattagaaaaaggaatcttggatgagattgagaaagatgcaagggataaaacctgacaagctttacaacctccttgaggaggtcttccctactctgtaaaatcagacagaaaatcattggcaaatggagcaaagcatgggcaaaactgatataatgaggaaacagagctgggaaaggataaatttatgtgtctgtttctgtttcctatcttttaatccttttttaccctttcttctggatactggagcaacgtattctgcaatttctacaggccttttctgttttatcctaaactaggaaaatatccagatataagtatttctggactatctgctacctcttctttctcctctgaggttttcatgcaaataggcgaggtcctatttgcataaaataggaagaatatgccttgtctcctaatatgcccaataatcttttaagaaagggcctgctgtgtaaaccaagggctatgatcttctgtactctgaagagagtgcttttggagcttctgggatgcaaggtatctacattgctaaatatgtgctttctgaaacaaaagatggctgtgggagagtaggagtctcactcaatgctggagaagcactcccaagttacagaaaataaacccatatctatgagtcctaggaacaaatgataaagatttaacaaaagagatcaataccattgttgtaacttacaacagagaaaaaccttggccatgtatagaacattttctctatttttacctcaaatatgatgtaattagaaaaattttaaaaaacgtggcatagttaaaaaaaaatggcacattcacttcataatgcttccatattgcctgtgggaaagttaggaaaacttgacagggaaggtcaaactgtttatagatttatgcatgatcttagagaaacaagttgtgattcctctgacacttgtaattcccagccttgccactgttttaatatctgttcctgagttatctaagtatttttctgtcatggatttatgttcaatgttttgttctccatgtttagctggggagtcgaggttcctgtttgagtttacctgtggagcgggaggctttcaatatttgtggcaacggatcttcctggaattcagagagtcacctactccattctctgggcatttataagaaaatataaagaatattcctcacattaggattccatactaattgttattgatagctgctaataacttacatgctagtaaagaagacattttagctttactaaatttcttagactcccaggacgtaaaacctcgctagctaagttgcaatattaccaactgaagtaaaatatttgggatctgtgttattggcagatggaaggtggttgcatcttgaagtcagcctaatatacaaatgaaacaacatgccaaaaaaaaacttcaccgattttgaggattaattgtagatctttgcgttttatgaaaaggctaagcctctcactgagatgttacatgaaacatcactagaactctttattaaagtcaaaataaggctgaagaagtcttttatgcccttaaaatagctgctatttcttcacttgtattacttttttaaccttgttaaaaaaggagttctaccttttctgtcttgagattaagggttactccaaaattaggccttgattataggcacattgcttactttcccaggttcttgtattttgtctctctggaaatgcgatgatatttataaggtacagtggcaaccactcccctgattaaaaaggctcattcagtccttgactctgagaaatttaacttacttacaggtacttcatgttgttactgctattttacaagttcataagacacaacacttgtcagtatgctgtcaaacgagctaagaacaagtcttattgtgtgatcctaatgctattctaggaaggtgtaaccttttgacagctattctgtggccagatcttgacagaataagttgaacttgactgtctcagagtgattgaggaagacactggagcatggtctaatttttgtaatattcctattcccaatgttgactgaatattcatgaatatattctgtgtgaaagacccacaaaggaatataaaagcatgttctacggtaatcaaccctcatgaagcttagaggcttctgtttttcgaaacataaaatcagcccaagtggcagaattgtagttattataccagctgttaaattagccaccagttataaagcagatatctatactggtaataactatatgtttgtggtctgttatgtgactagccaactttggaagaatagatgctaacgtcaataggaactaaaatattacatgagaagctaatttctgatttagtagagtcattcaaacttctctaacagatttatgtaatttattgtagagctcacagtggaaaacaagattaactctttaaaaagaaattaatttgcagacctagctgtgaagggcttctgacgtttagactggggaaatcaaacctctatcacttctgtccaaaacctcctattcataatttcagaaatagccaactctcttaagaattagaaaattaggaatgaaggagaactaagatgaacaccataggaaaatgagaattacataatgaaatctttcctttattccgattgttatatgattgagtggctttttcatgccaccaacaagttcgttcaagcaaaaggaatatgctgacaacttgaaatctttgtaatagcatcatataattcaggaaataatatgaagatatgctctttgtcagaaaaattctttccttacctaaaataagtcaagaaagcctactaaggcccatgatacctaggatctgctggcacaagaactttatagaacttccacctttagaagatagtaaatatttttaccagtgttgtgtattggtgtctggataggctaaagcagatgctcaaacagtgatcaagctcttactgaatcatatcatctcaaccactggaattcctgaatatctggaattcagtaggggaatcattctgtatttgtgggaattcgggaattttgtaatactctacaaataccaataatttacctacctgttatccccagtcttctgaacaagtggaatgagtgaaccacataccctaaagaattatttagctgaattatttagctaagttatgtaaaaccttaccatccgtttcatttaaaataagattaaatccctctagcaagcccaacattactccctttgagtttggaaggtctactaatcttgggcttaagcctaaccctttctctgatacaatggaaaatcctcatgaccatatatgatacttaaagagtttgtgggtttccctaggctcaccttgccaacatgtggccagatgctgaaaaagccgcctggggaagtgtgtcattgatattgaacaggagattcagtctatatcaaagtgttctgatgacagactgtgaccacactggacagaaccctatcaagtgtggttgagaattcatagtgctatcaagatgaaggagaaacccaagtggatacacgcttcacatgtgagaccaacatccaccatcgagtggggtataattcccatttaggaccttaaggataaattctctagatagtaaccttgaataatatgcaagctaaagagaaaaacttatttgatagacagcaggagagatagactgttttgttattaatacgttcttcttaattattttgaccattataattttgatacttagtttgtattaattttgatacttagtttgtatcaattgaacataaagcttattattagtctttcttttaaaagttagtatctcaacctcaaggaattttgtggtaattaaaaattgtcctgaatatgagatcaggacttaagaaacccctttctttgtcataatacttcaaactcaccaactggatgatttaaattcagaagacatgaaaaatttcaaatcttcccactgattagtcaatattacaaaaatcttaaatatcatcaccctttgtgttattgaagatactgatgagaagaaatttttaactaattaagttgaacgtaattatattcaaattgaaagtccctgaagggtatcacaaaactccaacaactctgtatcttttttttttttgagcagagtttcaccttattgcccaggctagagtgcaatggcacgatcttggctcaccacaacctctgcctcccaggttcaagcgattctcctgcctcagcctcctgagtagctgggattatagacatgcaccaccatgcctggctaattttgtattttttgtagagatggggtttctccatgttggtcaggatggtctcaaacttccaacctcaggtgatccacccgcctttgactcccaaagtgctgggattacaggtgtaagccaccacgcccggcccaactctagatcttaaatagccatgggggtccaatttaataaagcttaaatagacacacagatgagaaaatatcccagcccaaatggtgagggttagtttcttcaaaacccccaaaacgtatcatcacctaaaaatgagcttaccctgtttagaacctggcagtctccagtccccatacttacaaactcgaggataattaaatggtctgtatcatttaatattacaatagctaatgtgagtaaactgaattctacttgtacatgataggctttaccactatgaaatgtttttacacagggactaaaatggcactatgatcaaactgaaagagatttctttttttaatagatggggtctggctttgttgcctacactggagtgcagtagcacaatcatagctgtctatcgcctgtaactcctgggctcaagggcttcctccgtctcagcttcctgagtagctgggactacagggacatgccaccatgcctgcctatttttttttgtagagtcagggtcttgctcaggctggtttcgaacttctggcctcaagtgatcctgctgcctcggccttccgaagcactgggttcgcagacataagccaccatacctggccagagattattaaatacagtattagggggaataaaactaggactacaattgtaaactcttctgatatagaaacaattactgataaacagtgcattggacaatttgcagaaagatgcaaacatgatagaatcaaaatctaaacaagatatgacaaagaaaaacaaaaatggaattgggaaagcatttggaattggacatctggtaataaaattctattgcaaaaaaatatatagtaaagaattttcagaagccttcacttgcattagtgcacaaccactggttattcaacaactacaatgtatacttgctggtactgaagtacaagattatacctactcagacaaacaattaggtattggacatactactgtctatgtagagattaaatgatagtgtaaaaaggttgatcatattataggtaaaagagctgaaatctggcattgcagattgaaatttctgaaaactgaaataataaaactaatttcactaaagtatgtacattttcttatttacatagtttataatgtgttatataattcatgaatcttcaaaagaaatatactgagctattcaataaaaatttacattacagctttaggccaccaagccccatctattgattatgtacttggtgtaaattggcggggggaacaaaacaagagtgaaaactgagcctcaaaatacaaagcatgtagcaaaacagactactaaaattattctcaatttctaagcccattatatgatgcaggagaattcttatgtgtaggtaataaagaatctgttcaaatatgcatcagtggtatgacagtttcaaataacccactgaactaggaaatattcaccaccaaggaggtcaggtatactgatttggtcaacctggatattgacatgggatgttcttacggattgacagctccacttgatgctatcctatcacaaaatattattacctgatgttgatataattaacaagtcaatacaaaaagtaaggtctctctacaagacaagactaacatctctgtaatataaatgggactctgagtgtaatagatttagggtttctgcaagaattttgaaagttaaggatccaacgcctgtaatcccagcactttgggaggccgagacgggtggatcacgaggtcaagagattgagaccatcctggccaacatggtgaaaccccgtctctaataaaaatacaaaaaaaaaaaaaaaatagctggacatggtggcacacacctgtaatccccgctactcgggaggctgaggcaggagaatcgcgtgaaccagggaggcagaggttgcagtgagccgagatcgtaccactgcactctggcctggcaacagagcgagactctgtctcaaaaaaacaggaaagcaaaagaaaaagttaaggatcctaccaacaaaattggaatatgagactgaggaaattcctattccagctaaacccagaattgattatgttgatgaacacatgaatttcatgtgtgtgaaaacatatgaactcctcattgtcagtctaatgagagtgaaaacaacacatcgaagatgcggggagacgacaatacagagtgggctcataactgcattctagatactgggattactttccattaaggtatataattttagaatatctcacaaatagcccatgcaaaatcctgcggaaaggcaaccataaatatagagagaatatgtaaaaaagtggcatggtctagtatatgccaaacaaggcaagggtatacaaaaacctcaaggtcccagtatgacaaatcatgcttgtattgcacacccattaaaaagtcttctaaaaagtttttttaatggtgtgcaggcaggtttattcagaaaaagctcggattcatacttgtaaaagtctgagaaaagcattaaaatgctattatgatacagttgacccaaacaacacaggtttgagctgtgcaggtccacttatctgtggattttcttctacctctgccactgagacagaaagacaaactcctcctgctcctcagactactcagcatgaagatgaggatgaagacctttaggatgattcacttcttcctaatgaatagtgaatgtattacttccttaataacgtttttttttctctagcttcttgtaagaatacagtatataatatatgcaacacaaaaaatacgtgttaatcaactgctttatgttatcagtaaggcttccagtcaatgggagactaactactaattaagtttttggggagtcaagttatatgcagattctccactgagcaaatgttcagcactcttaactcctgtggtgttcaagtgtcaactgtatatatgtttaagagttattgtttacccagtagatcaagccaagaccaagttaggtttatgtgtttttggcttaacctaagaaaatgttcagactaaagcagtccatcaatagaacagactgccttttaaaccagggaacaacttgtctttgtaggtattttaggtatatgaatgaccatatgtgatctgctttgggtcatctatggtcccttccaacttaaaacttctctattcatgaacattgcataactgaattgtggatttcatataaataatatcttgttgcctactttaggtttgaaatgttttccttctcagttgcatagatatgtatagcaccatccccactatgaactctcatgtagaaaataccagattctaaagtcatctgtgaggctaaatgtcagacttaggcacttccacataatgctgcaaaaagcaacagcttaaaggtattacttgctcaacatgtcattccaaacacatacactatgattagcagctgaatttaacagtatctttccactttgaaaaacactttatatacctttacaaagaagccatagtatctcagggtagaaaaactcaacaggtagaaaacatggccttctcttagaaatgagctacgtaattttgagtacttatctcaaaatcattgcagaaacatatctagtgcttatggaaaaagaatcaaaagatctttttttttagctaaagattttgagtttttcttgtgacatttaagtcttttaatgtatgctgatttttatgattatctaactgtttcataatggttattcttgcctccatgaaagggaagactagaacaaaaacctgacaagaacaagttctagctccatcaccgacttactgagtgaccctaggcaaatcatgtgggctctttcttgtgttttaagttttacctccaatgaagtaactgcctcagactagctgtgaagctctcataaagtgatggatttgaaaatgccttgcaaagaatgagcagttaatacatagaaagtttcatgtacttccgtatattgcatgatgcccacccagggttaggttgataacagttgttgatccaataatgaaagaaataaaaagaactctttaaaataacgaagtaaaatagctaattttcctgttgtagttttaaaaattatataaactatataactaaacatatttatgtttattatatataatatgatatgcaattacataagacattattatataatgtttttatataatgcttaagtaattaaacaattatatttaaatataagttatactttccttccccagataagacaaagaacctgtttacttctctgagggatttattggttcctgtgaaatctgtggaggccgctaacactccatagccagagaatgacaacatatgattttcttttcagtcttgtagtatccacagtagtgatgtctgtccatgtacaagtgtctgtccaggacatccattaaattccatgcctgctctgtgtgttatgagggcagggacagaagacagattcactggtggtactttcaaacaatgtggtaggccttccttttggggtctgccatgacaatgataccccaggcggcaatgctaaggcccatgaccatcttcataatggtccatggacccggggggtatcccatcttcatgggcttctgtgccacccagtacacatacccgcctgcccccatcagccgcaacccagaaagcacgtgacagctccagcaggtctccaacaggtggtgttctgctggtgaggtcggcgatccgggtgtagctggggttgcaggcttggcaggcacggcggcggtatcgggaggcacagcgatcttgagggactcaaaaggctgggacaactgagaccccgtgttctggaactcggcctccctaaaaattatgttttaaaaaatacatagaatcggtaagatgaggaaaaagcataaaacggtcaaaaacactgggataattcaaggttcattttgacaatggtaatacaaatagaaaaactgacaaaaaagaaaatacatcttacattagaaaacatacaagagtagttgtatacaaacgaagacacgtaccaaaaataagttacaaaatatgaatgcatatacataaaaaatgtagtttcaaacaattcaaaagtaaaatgatgcaagacattaaaatattcacaaacacgctcgaaaaataagagctgacgcccaaattagaccagttcaacggaagtgtggggtgtggttggggatccgccgcagaaatcacgtggcgcccaggccaaggctgcaatttcccatgctgcttggagaagacgcctgggagggctcccaccatgcccaggggcaggctatgtgactgcccggtctgcagctgtaagtggtttctgggccagtctctttgtctggtcatgacctggttggtggccctagcttgtgccgagtggtcccggagtggcccagggggttgtgtgtggggagccagcgtgggcagcggaggtgctccctggggcctgcagtagggcacagcctctgcatcttgtgtgagcccagtgacccgcctgtcctgtccttccagggttgggtggcagggagggccaagggtgccctgcgtccgtgacgggtcagcgtttccagcaaatgggtccatggagggagagcctagctgagccggcgggctctaccaccttcatgaggttctgtttggacacctgtcctactcctgttcccccagatggtgaccatggaggaagacttgtgttgggcccaatggccctcggccagtgtccgtctgccaggtgccagcccccggtgcgctgaagctcaggccattcctgatgccctggcctcctgcactgagctgtggtgagcccatccgggtcctgctggatacatgggcggggaggggggtgccctgggttgtgttgatgatgagaaccttatattatcctgaagagaggtgatgacttaaaaatcatgctcaataggattacgctgaggcccagcctaggtgagaattttggaagaggatgctgggatccagaggcccccgacggggccactgtatttcgggctgcagacctagaggccctgaagggcatctgaaggtggcccaagcctatctctgagcaaccccgtgaggcagtcaaggatccctgtgtgggcataggctggggctctggttccctaggggcagggcatgtgggtggctcctccctgacccccattctcccctgtgtctttcagtgagctcttctgcccaggcaggccccctggcattgaccggcataggtgagtggatcctgctggggtcatgggccatgagccaggctgctggggtcgccaagggtcagcctttgggacaggagggtttccttagggagccaacctgaatccccactggggagggctaggttctccaggagggcagcttccttgggagtctgacccaaggaggatatcttctctaaagccctgcagtggtgagggtggtccaggcagcaaagggttccttcaaccccacccaggacagcgcccagctgagactcagtgtgcaggtctggccatgaggactgcccaggtcacataagggggtccataggagctccggggcaccacaggggtcacacaggagctctccttccccagagaggggtgagcgattgggcctatggggtcaggcctttggagatcaaggattgggccccacccatgaacctgaatgggactgagcctttgagcaatggaccatcccagtggtgcctcggagcctagtcgggggtgatgtggcttcaagggggttgggtcaaggctgagctctggccggtgcctggtagtgctgcaggctggccctgggactcgctggctttgggcaaaggggccagcccgtgtcccactggaggtcaccccttccctgtgggcaactagcaggaagggtggcatccttagctgggaaggcccactgtcgagggtcctgtccagggaatttgcctcccaggcttcttctgatccacggactcacctccagggtggtggggtcttgggcccgaggaaaggagaagataccctgtgttccccagttggctgagtgtggcttggctctgtgtttgggaggtgtgtagggtatgaatggggacccaccagagaacacacatggcccagggccccaggttatgatttcccatgcacacttggagagaactctgggtgagtgccctccactcccaggcacaggctatgcaactgccaggtctgcagtggcatgtggcttccaggtcagcctccttggttggccatgagcaggttggttgccctgtcctgtgcccagtggtcttggagtggcccaggggtcctgcaggggagctggtgtgggtagtggaggtgcttgtggggcctgcaatagagcgcagcctaggtgccttgcacgagctcagtgacccacctgccctgtcctagtcctagctcagtgacccacccccgctttgcagtgatggggagtaccaagcgtctcctgcgtctgtgatgggtcagtgttcccatcacatgggtccatggagggagagcatgcatgagctggcaccacccaccaccttcccactatggaggcgtgaggccatgtttggacacatgtcttcttgtccccccagacagtgagcctggaggaagacttgccctggtcccactgtccctgggccagtgtccatcagccaggtgcccagaccccagtgcgctgaagctcagccctccctggcactctggtctcctgcactgagctgtggtgagcacatccaggtcctgctggatgtttgcatggggaggggctttccccgggttgggtcgatgatgagaagcttctgttttcttgaagagaggtgatgacttaaaaatcatgctcaataggattatgctgaggcccagcctaggtgagaattttggaagaggatgctgggatccccggcaggagggattttgggctggagacctggaggccctgaagggtatctgcaggggccccatccctgtctctgcacttgtctgtgaggcagcccagtttccctgtgtgggcttcgtgtcagtgctctggttccctggagcagggcacgtgggtggctcatccctgaagtcacgttctccctttgtgtctttcagtgagctcttccgcccatgagggccccctggccttgagcagcataggtgagcggatcctgctgggctcatggaccaggccacatggggtcactgagggtcagccttcaggacaggagggattcctcagggagacaacctgaatccccactggtgagggattggttctccaggagaaccacctccttgggaatctgacccaaggaggacaccttccctgaagccctgcaggagtgacagtggtccaggcaggaaagggttccattagtcccatgcagggcagctcccagctgagacttggtgctagggtctggcctcgaggactgcccaggccacatgaggcagggtctcaggctgctatttccagtgcatgcttggagagggagcctgggtaggccccctccctgtgcaggggcaggctgtgcatctgctggggctgcagcggtgcctgccttcaggaccagcctccttggttggcttgagctggatagtggccttggccccacccaggggtcatggtgcagcccaggaattgcaggggagctggcatggggagtggaggtgctccaggggcttgcagtagggcacagcctgggcatcttgcttgagcccagtgaccagcctgccctgttttccagggttcagtggcagggaggaccaagggtcccccacgtccatgactatcactgtttcacatggatcccatcaggtgggtccatggagggagagcatgtgtgagtcagcaccccctgcctcctttcccgcatggaggcatgaggttctgttcggacacttttccctgtctctccagatggtgaccctgaaggaggacttgtgttgggcccaatggcctggggccagtgtctgtcagccaggtgcccagcccctggcgtgctgaagtttgggcccttcctggtgccctgttctatcgggggaacccgcccccaataattcaacgtaggtccttttctattttccctaagtgtcggccggtctgagaaataaagggaaagagtacaaaagaaagaaattttaaagctgggtgtccgggggagacatcacatgtcggcaggttccatgatgccacccaagctgcaaaaccagcaagtttttattagtgattttcaaaggggagggagtgtacaaatagggtgtgggtcacagaaatcacatgcttcacaaggcaataaaatatcagaaggcaaatgagggcagagcaccagggccaaattgaaattgctaatgaagtttcgggcacgcattgtcattgataacatcttatcaggagacagggtttgagagcagacaaccggtctgaccaaaatttattaggcaggaatttcctcgtcctaataggcctaggagcgcttcgggagaccagggcttatttcatcccttatctacaactgtataagacagacattcccagagcggccattttagagacctccccctaggaaggcattctctttctcagggttgttccttgctgagaaaaataattcagcaatatttctcctattcgcttttgtaagaagagaaatatggctctgttccgcccggctctcaggcagtcaggcctgatggttgtctcccttgttccctgaacatcgctgttatcctgttcttttttcaaggtgcccagatttcatattgtttaaacacacatgttttacgaacaatttgtgcagtgaacgcaatcatcacagggtcctgaggcgaaatacatcctcagcttacgaagatgacgggattaagagattaaagtaaagacaggcataggaaataataagagtattgatttgggaagtgataaatgtccatgaaatcttcacaatttgtgttcttctgccatggcttcagcaggtccctccgtttggggtccctgacttccctcaacactggtctcttccactgagccttggtgagcccatctaggtcctactggatgcatgtgtggggaggggggtgccctgggttgggtcaatgatgagaaccttatattgtcctgaagagaggtgatgacttaaaaatcatgcttagtaggattacgctgaggcctagcctaggtgagaatgttggaagaggatactggatgctgaggtccctggctgagctactgtattttgggatggagatctggtgactctaagggcacctgaagggccagaccctgtctctatgaggcagcccaggctccctgtgcaggcttgctgttggcactctggttccctggggtgggacatattggtggctcctccctgagccctgttctccccttgtgtctttcagtgagctcttccaccaaggagggccccctggcattgactggcataggtgagtggatcctgctggtgtcatgggccatgggccaggccacgtggggtcaccaagggtcagccttcaggaaagaagggtttcctcagggagccaaactgaatccccactgggaagagatgggttctccaggagggcggcttcctgggaaacaggaaccaaggaggacgccttccctgaagccctgcaggggtgacggtggtccaggcaggaaagggttccttcaattccacccagggcagctcccagctgagtctcggtgctcgcgtctggactgccctgactatgtggggggccacaggggctctggggtgccttgggggtcacacaggtgctctttgtccctggagaaaggtgggtgatcaggcccatggagttgagcagtggagattcaaggattgcacctgacacatggtcctgaatggaacccaccctgttgagcaatgggccatcccatgggcctcttcaagcctgaagaggggcggtgctgtttcactgggtttaggtcaaggctgagctctggccggtgcctggtggtgctgcagtctagctgttggactcgtgggctttgggccagtggggcagcctgcatccctctggaagtcaccccttccctgtggctggaagttaccccttcccagtgggcgaatgtggggaagggtcacctcctgaagtgagaaggcccactattgagggtcctgtcctggcaatttgctgcccatgctgcttctgagccatggagacacctccagtgtggtgggatcttgggcccaaggaagggagaagacactgtgccccccgattagctgagtgtggccaggctgtgtgtttatgaggtgtgaggggcatggatggaaactcaccagagaaagcatgtggccctgggaccccaggtcgtggtttccagtatgtgcccagatacagcacatgggtgggtgcccaccatgcacagggactggctatgtgactgccagctgtgcagcagcatcaggcatatgggccagcctccttggttgacaatgaactggttgctggccctggcctgtgcccagtagtcctggggtgaccctggtgtcatacaggggagctggcatgtgtagtggaggtgcttgtggggcttgcagtagggcacagccctggcttctagcctgagcccagtgacctgcctgtcctatcctttcggtgttcagtggcggagagagcattgggtgccctgcatccatgatgggtaagtattccacatggatctcatcacatgggtccatggaaggtgagcatccctgagctggcacaccacaccttctgtccacatggaggggtgaggttgtgtttgggcacttgtcctcttcctgttccttgagatggtgaccccagaggaggacatgcgttgggcccgctgtccctggccagtggccatcagccaagtgcctagcccctattgcactgaaactcgggcccttcctgtcaccttggtctcctgcgttgagcttgggtgagcccatccgggtgccactggatgcctaggcagggaggggggtgccctgggttgggtcgatgatgagaactttatattgttctgaagagaggtgatgacttaaaaatcatgctcaataggattacgctgaggcccagcctaggtgagaattttggaaggggacactagaatcccgaggtccccagcagggctgctgtattttaggctggatacctcgaggccctgaagggcacctcatggaggggcccaatcctgtctgtgctcctctattaggcacaccagactttctgtgtgggcttggtgtccacgctcagcttccctggggtgggacacgttggcggctcctccgtgagccccattatcctctgtgtctttcagtgagctcttccccccagcagacccctgggattgacgagcataggtgagtggagactgctggtgtcatgggccatgagccaagctgcgtggggtccccaagggtcagccctcgggccacctgggtttcctcaggagctgatctgaatcccaactggggatgtgttctccaggagggcagcttccttgggaatcagacataaggaggaggccttctctgaagccccgcaggggtggcagttgtccaggcaggaaagggtttcctcagccccacgcagggcagtgctcagctcagacttggtgcttgggtcaggcctctaacatggccaggccacatgaggggggcaacaagggctccggggagccaagggcatctcacgggggctctccaaccctggagaagggtgggtgattcggtccatggggtcaggccatggagattcatggattgcagcaaacccaggaccctcaatgggactgaccctataagcagtgggccctcccagtggcacctctttgagccatttgtggggcggcgctgtttctctgaggttgggtcaagactagctctggccagtgcctgatggtggtgcaatccactcctgggactcgtgggctctgggccaaggctgcagcccatgtcccgctgggggtcaccccttcattgtgggcgagtggcagtaatggcctcctgagttgggaaggcccgcagtggaaggacctttcctggaaatttgcagtccaggctgcttctcagccattaggacaactccagcgggttggggggcaggggcgggtcttaggcccaaagaaaggagaagataccatatgtctcccggttggctgagtgtggccctgctgtgtgtgtgggaggtgttgtgtggggcatggattgggacacaccagagaaagcttgtggccctggagccccaggctgcgatttccagtgcaccttgaggaaaggagggtgggtgccctccatgcacagggcagactgtgcaactgccaggtaggcaacagcacgtggtgtccgggccagggtccttggtttgctgtgagctctttggtgtccgtggcccctacccaaggatccagataccacccggggtcatgcaggggagctagcatgggcaatggaggtgctcaaggggcctgcagtagggcacagcccaggtgtcttgcctgagcccaggaacccacctgccctgtccttccatggttcagtggctgggagagcaaagggttccgctgatctatgacacatcagtgtttcccatggatcccatcacatgggtccacggagagagagcatgtgtgagctggcacccccaaccccattccctgtatggaggcgtgagcccatggttggacacatgtcctcctcctgtccccccagatggtgactgtggaagaagacttgctttgggaccgctggccccaggccagtggttgtcatccaggtgcccagcccttggtgcacttgagctcaagcccttcctggtgccctggcctcctgccctaagctgtggtgagcccatccaggtcccactggatgcatgcatggggaggagggtgccctgggttggatcgatgatgagaaccttatattgtcctgaagagaggtgatgacttaaaaatcatgctcaataggattacgctgaggcccagccttggtgagaattttggaagaggatgctgagatcccaaggtctctggcagggccactgtattttgggctggagacctggaggccctgaagggcatcttaggggtgcccgaccccatctctgcgctcctccttgaggcagcccaggctcccttgcgggcttggtgtcagccctccagttccctggggttgaggcacattggaggctccttcctgagcccccattctcccctgtgtctttcagcgagctcttctgcccagggggacccctggccttaagtgggataggtaagtggatcctgctggggtcgtggaccatgagccaggtcgctttgggtcactgagagtcacccttcaggccacgagggattcctcagggagcccatctgaaacccaccagggacggatggtttctccaggaggacagcttccttggaagtcggtcccaagaaggatgccttccctgaagccgtgcagagatgatggacgtccaagcaggaagggcttccttcaactcaatgcagtgcacatcctagctgagactcagtgcacaagtcaggcctggaggacttcccaggccacatgagggggtccacagggtctccaggggccacgggtgttatgagggtgctctctgtccccgaggcttgcagaggggcagggtgtgggtgatcggacttatggagtcaggccgtgaagattcaaggattgggcccaacccatggcccagcatgggccgaacctgtagagcaatgggccatcccggtggtgcatccttgagccttgtgggggtggtgtgaccttagtggggttgggtcaagcctgagctctggccttcacctggtggtgctgcaggctggccctgggaatttgggctttgggccaagggtgcagtctgtgtcccgctaaaggtcacccctccccaaagtggagtggccagaaggatggcatcctgtggtagaagtcccactgtcaagggtcctgtcctggcaatttgttgcccaggctgcttctaagccatgggttcacctccaaagtggcggggtcttgagccgaaggaaaggggaagacatcatgtgttccctgattgactgagcatggcctggctctgcatttggaggtgtgcggtgcacgaatggggacccatcagagaaggcatgtggccctggggctccaggatttgatttctggtgtgagcttttacagggggtctgtagtggcacgtagcattcaggtcagcctacttggtttgctctgagcttgttggtggtcctggccctgcccagtggtcccattgtggcatagagtcatgtgagggagctgtggcaaggagggccaagggttccccacattcatgatcgttactgtttacatggatcccatctcttgagtccatggagggacagcatgtgtgagccagcaccccctgcccactttcctgcatggaggcgtgaggccgtatttctatacgtgtcccccacccctccagatggtgaccccagaggaagacgtgcattgggtccgctggccccaggccagtgtctctcagccatgtgctcaacacctggtgagctgaagctcaggcccttcctggcatcctggtctcctgcactgagctgtggtgagcacatctgggttcctctggatacgtgtgcagggagggggatgcactgggtcgggtcaatgatgagaaccttatattgttctgaagagaggtgatgacttaaaaatcatgctcaataggattacgctgaggcccagcctaggtgagaattttggaagaggatgctgggatcccaagttccccagcatggccagtatattttaggcaggagaccctgaggctctgaacggcatctccggggggcacaaccctggctctgggctcctctgggaggcagcccaggttccctgtgcaggcttgggctctggttccctgagcccccattctccctcgtgtgtttcagtgagctcgtcctcctaggtggggcccccaggcattgaccggcataggtgagtggtcctgctggggtcatgggtcatcagcaggttggagtcaccaagggtcagcctttgagacaggagggtttccacaggcagccgacctgaatccacaccatggagggatagattggtcctccaagagggctgttttttttcggaatcagacccaaggaggataccttccctgcagccctgcggggatgacggtggtccaggcagggaagggttccttcagtctcacgcaggtcagctcccagctgagtctcagtgcattggtctggcctccaggactgaccaggccacgtgaggggggcaacaggggcttcgggatgcagtggggtcacacaggatctctccatccccagagaaaggtgggcatagaacccatggattcgagctgcagagattcaagaatcgcacacgaattattgccctgaatgggacccaccctgttgagcaatgtcccatcccagggcacctctttgagcctgaagggggtggtgctgtttccctaggtttgggtcaaggctgagctctggccagtgcctggtggtgctgtagtcctgtcatggactcgttagctttacgccaaggggtcagcccacgtcctactggggatctccccttccctgtggctggaagtcaccccttccccattggcaagtgtcaggaagggtgacctcctgaggtggaagtcctgttgagggtcttgtccctggaatatgccacgcatgctgcttctgagccatggggtcacctccagggtagcgggtcttgggcccaaggaaaggagaagtcaccatgtgtcccccgattagccaagtgcggccctgctctgtgtttaggaggtgtgtggggcatggatggggacccaccagagaaagcatgtggcccagggaccccaggttgcaatttctaggacatgctgggatagggcacctgtgtgggtgtccacagtgcacagggataggctatgtgacttgcaggtctgcagcggcatctggcatccaggccagcctccttggtgggccgtgaactgaatggtggcgctggcctgtgcccagtatatctggtatgaccctggggtcgtgtgggggagccggcatgggcagtggaggtgcttatgggacctgcagtaggacacagtcggggcttcttgcccaagcccagtgacccgcttgccctgtccttccagggttcggtggctgagagagcttttgttgccctgtgtccgtgacgggccagtgttctgcatgcatcccatcacatggatccatggagggtgagcatccctgggctgacacaccccaccttctgcccccatggaggggtgaggttgtgttttcacacctgtcttactcctgtttccccagatgttgagcccagaggaagacttgcactgggcccaatggccccaggtcagcgtccatcagccaggtgtccagcccctggtgcactgaagatcgggcccttcctggtgccctggtctcctgcattgagctgtggtgagcacatccggatcctgctggatgcgtgtgcggggaagggggtgccctgggttgggtcaatgagaaccttatattgtcctgaagagaggtgataacttaaaaatcatgctcaataataggattacgctgaggcccagtctaggtgagaggtttggaagaggatgctgggattccgaggtccccaggagggcccctgtatttttggctggagacctggaggccctgaagggcatcttgtgggtgcccaaccctgtctctgcgctcctccttgaggcagcccaggctccctgtgcaggcttggtgtcagccctccagttccctgggtttgaggcacatgggaagctcctttctgagccccgttctcctcttgtgtctttcagtgagctcttccacatggaagacccctgtcattgactggcataggtgagtggctggcatcatgggccatgagccaggccgcgtgaggtcgccaagggtcagccttcgggaaagaagggtttcctcagggagccaacctgaatccccactgggaagatatgggttctccaggagggcgacttcctgggaaacaagaaccaaggaggtccccttccctgaagccctgcaggggtgacggtggtccaggcaggaaagggttccttcagttccacccagggcagctcccagctgaggctcggtgcttgcgtctggacttaaggactgccctggccatatgaggggtgccacagtggctctggggtgccatggggtcacacaggcactctctgtccctggagaaaggtgggtgattgggcccatggagttgagctgttgagatgcaagttttgcacctgacacatggccctgaatgggacccaccctgttgagcaatgggccatcccatgggcctcttcgagcctgaaggggggcggtgctgtttcactgggtttaggtcaaagctgacctctggccgccacctggtggtgctgcagtccagcccttggactcgtgggctttgggccaagggggcagcctgcatcccactgaaagtcaccccttccctgtggctggaagttatcccttcctcatgggcgagtgttgggaagggtggcctcctgaagtgggaaggcccgctattgagggtctgctcctggcaatttgctgcccatgctgcttctgagccatggagtcaccaccagtgtggtggggtcttggacccgaagaaaggagaagacactgtgccccccgattagctgagtgtggccaggctgtgtgtttgcgaggtgtgaagggcatggatggagactcaccagagaaagcatgtggccctggggccccaggttgtggtttccagtatgtgcttggatatggcatatgggtgggtgcctaccatgcacagggactggctatgtgactgccagctgtgcagcagcatcaggcatacgggccagcctccttggttgaccatgaactggttgctggccctggcctgtgcccagtagtcctggggtgaccctggtgtcatgtaggggagctggcatgtgtagtggaggtgctcgtgtggtctgcagtagggagcagccctggcttctagcctgagcccagtgacctgcctgtcctgtcctttcagggttcagtggcggagagagcatcaggtggcccacgtctgtgatgggccagtattccacatggatctcatcacatgggtccatggaaggcgagcatccctgagctggcacaccccaccttctgccagcatggaagggtgaggttgcatttggcacctgtcctcttcctgttcctcgagatggtgaccccagaggaggacttgcattgggcccactgtccccgggccagtggccatcagccgggtgcctagcccctgttgcactgaagctcaggcccttcctgttgccctggtctcctgcattgagcttgggtgagcccatccggttgccactggatgcctaagcagggaggggggttccctgggttgggtcaatgatgagaaccttacattgttctgaagagagatgatgacttaaaaatcatgctcaataggattacgctgaggcccagcctaggtgagaattttggaagaggacgctgggatccctaggtccctgacagggccactgtattttgggctggagacctggagtccttgaagggcatctggagggggcccaaacctgtctctacgttcctccatgaggcagtccaggctccctgtgcgagcttcgtgtcggtgctcagattccccttggtggtgcatgtgggtggctcatccctgagcccctgttctccccttgtgtctttcagtgaactcgtttgcccaggaggacccctggccttgagcagcataggtcagtggatcctactggggtcatgggccatggaccaggccacgtggggtcactgagggtcagctatcaggacaggagggattcctcagggagacaacctgaatccccactggtgagggattggttctccagaagggccgcctccttgggaatctgacccaaggaggacaccttccctgaagtgctacaggagtgacattggtccaggcaggaaagggttccattagtcccatgcaggtcagctcccagctgagacttggtgctagggtctggccttgaggactgcccaagccacatgaaggtggccccaggctgtgatttttggtgcgtgcttggagagggagtctgggcaccctccctgcacaggggcaggctgtgcgtctgccaggtctacagtggcgcctagcttcagagcaagcttccttggttggccttagctggttggtggccctggctcctacccaggggtcacaatgcagcccaggaagtgcagggaagccggcttggacagtggaggtgctccaggggcctgcggtagggcacagcctcggcatcttgcctgagcctagttactcgcctgtcctgtccttccagggtttggtggtggggagatacaagggttccccaggtccataactgtcctcgtttcacatggatcccatcacatgagtccacggatgtagagcatgtgtagccagcagcccctccccgctttcctgcatggaatcttaaggccctatttggacacctttccccgtccctccagatggtgagcacagaggaagaattgcgttaggccctttggccccggaccagtgtctgccagccacgtgctcagcctcccgtgcgctaaagctcaggtccttcctgtcatcctggtatcctgcactgaggtgtggtgagtccatccaggtccctctggatgtgtgagtggggatgggggtgtcctgggttgggtcgatgatgagaaccttatattgtcctgaagagaggtgatgacttaaaaatcatgctcaataggattacgctgaggcccaacttaggtgagaattttgaaagaggatgctgggaatcacaaggtccccggcaggaccactgtattttaggcgggagacctcgaggccctgaagggcatatcatggaggggtacccaacccagtctgtgctcctccattaggcacaccaggcttcctgtgtgggcttggtgtctgcactcagcttccccgggggtgggacacattggtggctccttcctgagtcgcattctcctctgtgtctttcagtgagctcttccccccagcaggccccctgggattgactggcaaaggtgagtggatactgctcgtgtcatgggctgtgagccaagctgcgtggggtccccaagggtcagccctcgggtcacctgggtttcctcaggagctgatctgaatcctgactggggatgtgttctccaggagggcagcttccttgggaatctgacacaaggaggaggccttctctggagccctgcaggggtggtggtggtccaggcaggaaagggtttcctcagctccacacaggacagtggagctgggcagtgctcagctcagacttggtgctcaggtcaggcctctaggatggccaggccacatgacgggggccacaagggctccagggcaccacagacatctcatgggggctctccaaccctggagaagggtgggcaatttggcccattgggtcgggtcatggagcttcaaggattgcaccaaacccatatccctcaatgggaccgaccctattaagcaatgggccatcccagtggcacctctttgagccatgtggtgggtggcgctgtttctctgaggttgggtcaagactagctccggccagtgcctgatggtggtgcagtccagtcctgggactcgtgggctttgggccaagggtgcagcccgtgtcctactggggatcaccccttccttatgagggagtggtgggaagggtatcctcctgaggtaggaaggcccgctgtggaaggaactttcctggaaatttgcagtccagactgcttctgagccatgaggtcatctccggggtggcggggtcttgggcccaaggaaaggagaagacaccatatgtctcccgattggttgagtatggctccactctgtgtgtgggaggtgttgtgtggggcatggattgggacccaccagagaaagctcgtggcactggaaccccaagctgcaatttccagtgcaccttgggaaggggactgggtgctcaccctccatgcacagggcaggctgtgcagctgccaagttggcagtggtgcgtggcatccgggccagcgtccttggttcgctgtgagctggttggtgtccttgacgcctgcccaggggtcccagtgctgcttggggtcatgaggggagccagcgtgggcaagggaggcctgcagtagggcacagcccgggggtcttgcctgagcccaggatcctgccggccctgtccttccatggttcggtggctgggagggcaaagggtcccccacgtctgagacacatcagtgtttcacatggatctcatcacatgggtccatagagagagagcaagcgtgagctgacaccccccacccccttccctgtatagaggtctgagcccctggttggacacatgtcttcctcctgtccccccagatggtgtctgtggaggaagacttgccattgggttgctggccccaggccagtggttgtcatccaggtgcccagccttggtgcactgaagctcaggcccttcctggtgctctggtctcctgcactgagctgtggtgagcacatccgggtcccactggatgggtgtgtgtggtggggggtgccctgggttgggtcgatgatgagaaccttatattgtctgaagagaggtgatgacttaaaaatcatgctcaataggattacgctgaggcccagcctaggtgagaattttggaagaggatgctgggaattacaagttccctgtgaagtccactgtattttgagctagagacctggaggctctgagggcatctggagggtgcccaaccctgtctctgcactcctccatgaggcagcccaggctcactctgtgggcttggtgtcggcgctcctgttacccaagggtggggtactttggcatctcctccctgagcccccattctcccctgtgtctttcagtgacctcttttgcccggcagaccccctggcattgaccagcataggtgagtggatcctgctggggtcatgggtcatgagccaggctgtgtggggttgccgagcatcagcctttggctgcaagggtttcctcaggaactgacccgaatgcccacctgggatgggttctccaggagggcagcttccttaggaatcggacccaaggaggataccttccatgaagccctgcaggggttgtggtggtccaggcagtaaagggtttcctcagccccatgcagggcagcacccagctgaaactcggtgcttaagtcaggcctctaggatggcccgtccacatgaggggaaccacaagggcactggggcgccaagggggtcttatgggggctctccgaccttggagaggtatgtgtgattcggcccatgaggtcaggttttggattttcaaggatctctccaaacccatggccctgaatgggaccgaccctattaagctatgggccatcccagtggtgcctctttgagccaagtgtggggtggcactgtttccatgaggttgggtcaagactagctctggtgaccccatgatggtgctgcagtctggccctgggactcgtgggctttgggccaagggtatagcccatgtcccaccaggggccacaccttccttgtgggcaagtggcggacagggtgtcctcctgaggtgagaaggcctgctgtggaaggacctgtccaggctgcttccaagctatggggtcacctacagggtggtggggtcaaggaaaggagaagacaccatgtgtctcccgattggctgagtgtggccccactctgtgtgtgggaggtgttgtgtgaggcatggatggggacatatcagagaacacacgaggccctgggtccccaggctgcaatttccggtgtggtgtggagcagggcctgggtgcttgccctccacacacaggggcaggctgtgctactgccagattggcagcagtacgtggcatccaggccagcctccttggttggccgtgagacggtaggtggccctggctgacacccaggggccagtacagccctggggtcatgtgaggcaactggagtgggtagtggaggtgctcaaggtgcctgcagtagggcatagccagggcgtcttgcctgagcccagtgacctacctgccctgtccttccagggttcagtggtgcagagggccaaagttcccctgtgtccatgacacatcagtgtttcacatggatcccatcacatgggtccatggtgggagagcaatcgtgagctagcatcccccacccccttcctgcatggaggcgtgaggttccatttggacacatgtccacctcctgtcccccagatagtgagactggaagaaaactttcattgggcccgctgtcccggggtgagtggtcatcagtcaggtgcccagcccttggtgtggtgaagctcaggctcttcctggcgccctggtctcctgcacggagctgcggtgagcacatccgggtcccgatggatgcatgcgtggggatggagggcgtgccctgagttgggtcaatgatgagaaccttatattgtcctgaagagaggtgatgacttaaaaatcatgctcaataggattacgctgaggcccagcttaggtgagaattctggaagaggatgctgagatccgaagtcccctggaagggccactgtattttgggctggagtccttgaggccctgaaggacaccttcggggtgcccaacccagtctctgcactcctctgtgtggcagccaaggctccttgtgcaggcttggtgttggcattctggttccctgggggtggagcacatcgacggctcctccctgagcccccgttcttctctgtgtctttcagtgagctcttctacccaggcgggcccctgcccttgagcggcataggtgagtggatcttgctggggtcacgggccaagagccaggccacggggggtcgctgagggtcacctttcaggccacgagggtttccttagggagctgacctgaatccccaccagagatggatggtttctccggaagggcagcttccttgttaattgatcccaagaaggacgccttccctgaaaccctgcaggggtaatggaggcccaggcagcagagagttccttcaacccaatacagtgcagcagcttgttgccttgatgctccccctccctggagaaaggtgggcatagggcccgtggagttgagttgcagagatttaaggatcgcacaggacttattgacctaaatgggactgaccctgttgagcaacgtgcacttggtgcatgggtcaggtgtggagcactgcccaggccacatgaggggtccactgggtctctgggggccacgggtgttatgcaggagctctccgtccccaaggcttgcaggggggtaggatgtcggtgatcgagcttatgcagtcaggccgtgaagattcaaggattgggcccaacccatggccctgatgggaccgaccctgttgagcaatgggctatcccactggtgcctccttgagcctggtgggggcagtgcggcctcagtgggcttggatcaaggctgagctctggccagcacctggtgtttggccctgggaatcgtgggctttgggccaagggttcagcctgtgtcccactggagttcatccctaccggaagtggagtggatggaagggtggcatcctgtggtggaagacccaccgttaagggtcctgtcctggcaatttgatgcccaggctacttctgagccatggagtcacctccagggtagcagggtcttgagccaaaggaaagttgaggacatcatgtgtcctctgattggccgagcgtggcccagctctgtgtttaggaggtgtgcggtgcatgaatggggacccaccagagaaggcatgtggccctggggccccaggatgtgatttctggtgtgtgcttataaagggtgcctggatgggttcatttaatgcccaggggcaggccatgtgactgccaggtctgcagtggtacgtggcatccaggccagcctccttgatttgctgtgagctatttggtgcccatggccctgcccagtggtcctgatgcagcccagattcgagcaggggatttggcgtgggcagtggaggtgctccagggtcctgcactagggtgcagcctgggcgttttgctcgaaccctgtgaccctcctgccccgtccttccagggttcagtggccaagggttcctcgcgtaaatgaccatcactgttttacatggatctcatctcatgagtccatggagggagagcatgtgtgagccagcaccccctgcccactttcctgcatggaggcatgaggccttgtttggacacctgtcccccacccttccagatggtgaccccagaggaagacttgcgttgggcccactggctctgggctcagcccctggtgagctgaagctcaggcccttcctggcaccctggtctgctgcactgagctgcggtgagcctatctgggtcccactggatgcatgggttgcggggcagtggagggtgatgccctgggttgggtcgatgatgagaaccttatattgtcctgaagagaggtgatgacttaaaaatcatgctcaataggattacgctgaggcccagcctaggtgagaattttggaagaaggtgctgggatccggagttccctggaatgaccaatgtattttgggctggagaccttgaggccctgaacagcagcatctcgtgggggcccaaccccttctccgtgctcctctgtgaggcagcccaggctccctgtgtgggcttggtgttagtgctccggttctgtgaacccccattctccccttgtgtctttcagtgagctcttccacccaggtgcaaccccctggcattgaccagcataggtgagtggtcccgctggggtcatgggtcatcagtcatgcagtgtggggtcaccaagagtcagcctttgagacaggagggtttccacaggcagctgacctgaatccacaccatggaagggtaggttggtcctccaagagggctgtttttttgggaatcggacccaaggatgatatctttcctgcagccctgcagtgatgacggtggtccaggcaggaaaagtttccttcaatctcatgcagggcagctcccagctgagtctcagtgcactggtctggcctcgaggactgaccaggccacgtgaggggggccacaggggctttgggatgccatggggtcacacaagagctccccatccctggagaaaggtgggcatagagcccatggagttgagctgcagatatttaaggatcacacaggatttatagccctgaatgggaccgaccctgttgagcaatgtgccatccatcctatggtacctctttgggcctggatggggtgttgctgtttccctaggttttggtcaaggctgagctctggccagtgcctggtggtgctacagtccagccacggacttgttagctttaggccaagggatcagtccacgtcctgctggggatctccccttccctgtggctggaagtcaccccttccccattggcaagtgtgaggaagggtggcctcctgaggtggaaggcctgctgttgagggtcttgtccctggaatatgccacccacactgcttctgagccatagggtcacctccaggatagtgggtattgggccaaaggaaagaagtcaccatgtgtcccctgattagccaagtgtggccctgctctgtgtttaggaggtgtgtggggcatggatggggacccaccagagaaagcatgtggccctgggactccaggttgtgatttccagttcatgctgggatagggcacctggatgggtgcccacaatgcaccggggcaggctatgtgactgccagctttgcagcggcatctggcatccgggccagcctccttggttggccatgaactggttggtggccctggcctgtgcccagtagctctgtcgtaatcctggggtcatgcgagggagccggcatgggcagtggaggtgctcgtgggacctgcggtaggacacagccaggtcttcttgcccgagcccagtgacccacctgccctgtccttccagggttcagtggttgagagtacagggtgacttgtgtctgtgacaagccagtgttctgcatggatcccatcacgtggatccatggacggcaagcatccctgagccgccacaccccaccttctgcctccatggaggggtgaggttgtgtgtggacgcctgtcctactcctgtttccccaggtattgagcctggaggaagacttgaattggtcccaatggtcccaggccagcatccatcagctaggtgctgagcccctggtgcactgaagattgggcacttcctggcaccctggtgtgctgcaccgagctgtgatgagcacatccgggtcctgctggatgcatgcgccgggaaggacgtgccctgagttgggtcgatgatgagaaccttatattatcctgaagagaggtgatgacttaaaaatcatgctcaataggattacgctgaggcccagtctaggtgagagttttggaagaggatgctgggatcctgaggtcccctggtagagccaattgtattttgggctggagacctggaagccctgaagggcatctgggaggcccaaccctgtctctgtgctcctccatgaggcagccctggctccccatgtaggcttggtgatggccttcctgttccctgggggtggggcacatgggtagctcctccctgacccccattctctcctgtgtctttcagtgagctcttccccacaggtgggccccctggcattgactagcatcggtgagtggatcctgctggggtcgtgggccgtgcaccaggctgcatggggtcaccaagtattagccttcaggacaggagggtttcctcagggagtcgaccttaatcctcacctgtggagagatgggtttgtcctctaggagggcagcttcctgggaaatcagacccaagacgatgccttccctgaagccctgcaggggtgacggtggtccagtctggaaagggttccttcagtctcatgcagggcagctcccagctgacacttggtgtgagagtctgtccttgaggactgcccaggacaaatgagtgggacaacagaggctcccggataccacagggatcactcaggggctctccgtccctggaaatgggtgggcgatcgggcccatggggtggggctgcggagattcaaggatcgtgccctgctcatggccctgaatgcaaatgaccctgttgagcaatgggtcacaccagtagctcctttttgagcctggtgggtggcggctcagcttcaactggttgggtcaaggctgagccatgactggtgctttgtggtgccgcaggccaaccctgggactcatgggctttgggtcaagggtgcagcccgcctgctgctgggggtcaccccttcttcgaggtcagtggcgggaagggtcacgtcccgaggttggaaagccccctcatgagggacctgtcctgggaatttgttgcccaggctgcttctgagccatgtggtcacttccgggtggcggggtcttgggcccaaggaaaggagagggcaccatgtggctcctgattggctcagtgtggcccagctctgtgtttgacaggggtctggggtgtggatgaggacccaccagacaaagcacgtggccctgggcccaggctgtgatttctggtgcgtgcttggagaaggatcctgggcaggcattctctccaaacaggggcaggttgtgggactgccagattggcagcagtgcctggcatccaggccagcatccttggttggctgtgagctggttggtgaccttggaccctgcccagggtttccgttgtggtccagagtcatgcagtggggccagtgtgagcagtggaggtgctccaggggcctgctgtatggcacagccagggcatcttacccaagccctcctgcactggtctcctgcactgagctgtggtgagcccatctgggttcctgtgatgcctgtgcggggagggggttgccctgggttgggtcgatgatgagaaacttatattgtctgaagagaggtgatgacttaaaaatcatgctcaataggattacgctgaggcccagcctaggtgagaattttggaagaggatgctgggaattatgagttccctggcagaaccactgtattttgggctggagacctggaggctctgagggcatctggagggtgcccaaccctgtctctgcgctcctccgtgaggcagcccaggctcactatgtgggcttggtgttggcactcctgttacccgggggtggggcattttggcatctcctttctgagcccccaatctcccctgtgtctttcagtgagctcttctgcccagcagcctccctggcagtgaccagcataggtgagtggatcctgctggggtaatggcccatgagccaggctgtgtggggtcaccaagcatcagccttcagccataagagtttcctcaggagctgacccgaatgcccacctgggatgggttctccagaagagtggcttccttggaaatcatacccaaggaagataccttccctgaagccctgcaggggttgcagtggtccaggcagtaaagggttttctcaacctcatgcagggcagtgccccactaagactcagtgctctggtcaggcctttaggatggccaggccacatgagaggggccacaagggctctggggcaccaaggggttcttgcaggggctcttcaaccttggagaggtgtgtgtaattcagcccatgaggtcaggctgtggattttcaaggattgcaccaaacccatggccctgaatgggacaaaccctaataagttatgggccatcccagtggtgcctctttgagccaagtgtggggtggcactgtttcctaagggtgagtcaagactagctctggctggcacctgatggtggtgcaatcctgccctgggattggtgggctttgggacatgggtacagcccatgtcccattggggtcaccccttcattgtggacaggtggcgggaagcatgtcctcctgaggtgggaaggcctgctgtggaagaccctgtctcagaaatttgctgtcttggctgcttctgagctatggcgtcacctctgtggtggcgggagtctcgggtgaatggatcctgctggggtcatgggccatgagccaggccggggtggggtccctgagcgtcacctttcgggtcatgagggtttcctaagggagccgacctgaatccccaccagggatgaatggtttctctgggaagcaggtttccttggaaatcagtcccaagaaggacaccttccctgaaaccttgcaggggtaacagaggtccaggcaagagagggttctttcaacccaacgcagtgcagatcctagctgagacttggtgcacaggtgagtcctggaggactgcccaggccacatgagggcatccacagggtctccgtggccaggagtcttatacgggagccctctgtccccgaggcttgcagaggggttgggtgtgggtgatctggcttacggagtcaggccgtgaacattcaagggtcgggaaccacccatggccctgaatgggaccgaccctgttgagcaatggccatcctggtggtggcaccttgagcctggtgggggtggcgctgcctcagtggggttgggtcaaggctgagctctgcctgtcaccttgtggttggccctgggaatcatgggctttgggccaagggtgcagcctgcgtcccgcttgaggtcactcctacctgaagtggagtggccggaagggtggcatcctgtggtgggagacccacggtcaaggatcctgtgctggcaatttgctgcgcagcctggttctgagtcatggggtcacctccagggtgacagggtctttgtcaaagggaaggagaggacattatgtggcccctgattggccaagcatggcccagctctgtgtttgggaggtatgcggtgcctgaatggggacccaccagagaaggcacatggccctggggccccaggatggtatttctggtgtgagcttataaagggtgcatggatgggtgcattccatgcccagtggcgggttatgtgactgccaggtctgcagtggcacatggggtccgggccagcctccttggtttgccatgagctggttggtggcccaggccctgcctagtggtctcattgcagcccagagtcatgtgggggagctggcgtgggcagtcgaggtgctccagggtcctacagtagggtgcagcctgggcgtcttgctggaatcccatgacccacctgccctatccttccagggttgagtggcagggagggccaagggttcctcgtgtgcatgactgtcactgttttacatggatctcatctcatgagtccatggtgggagagcatgtgtgagccagcacaccctacccactttgccctatggaggcacaaggccctgtttggacacctgtcccccacccctccagatgctgaccctggaggaagaattgcactgggcccactggccccgggaaaatgtccctcagccaggtgcttagcccctggtaatctgaagctcaggcccttcctgatgccctggtctcctgcactgagctgtggtgagcacatctgggtcccaatggatgcatgcatgcgttgtggggtggtggtgtcctgggttgggtcgatgatgagaaccttatatgttctgaagagaggtgatgacttaaaaatcatgctcaataggattacgctgaggcccagcctaggtgagaattttggaagaggatgctgggatttctaggtccctgtcatgggcactgtattttggactggagacctccgggccctgaacagcatctcgggggggactctaccctgtctccacattacatgtgaggcagcccaggctccctttgtgggcttggtgtctgcactctggttccctgtggtagggcagcttgctgggtccttcctgagcccctgttctccctttgtgtcttctgtctttcagtgagctcttcagcccaggtgggctccctgacactgatgcgcataggtgagtggattctgctggcatcatgggccatgagccaagctgcgtagggtcaccaaaggtcactctttaggccacgtgggtttcctcagggagccgacctgaatccccaccaggttgggacagtttctccaggaggctggcttccttgggaatcagacccaagacaatgccttccctgaagccttacaggggtaacagttgtccagacaggaaagggtcccctcagtcccattgaaggcagctcccagctgagactcagtgtgcgagtctggcctcaaggatggcccaggccacatgaaggaggccacaggggctctggggtgccacaggggtcacacgagagctctctttccctggagtggggtgctcgaatgagcccatggggtcaggctgcagagattcaaggatcgcatcccaaccgtggccctaaatgcgaccgaccatgttgagtaatgggccatctcagtggggcctctttgagcctggtggggggcggggctgtttccctgggtttgggtcaaggctgagctctggccagcgcctggtgatgctgcaggccagcccaggttcttgtgggcgttggtccattcggcagccctgtcctcctggaggtcaccccttgcctattggtgattggctggatcctgaggtggaaagacctgctgttgatggtcctgtcccaggaatttaccacccaggctgcttctgagccatggggtcacctccagggtggcggagtcttggggctaagaaaaaagaggacactatgtagcccacggttggccaagggtggcctgactctgtgtttgggacatgtgcggggcatggatagggacccgccagagaaagcacgtggcccggggactccaggcttcgatttcaggtgtggcttgcaaatagcacctaggcaggtgcccaccacgccctggggcaggctatgcaacttccatctccacagtggcgcatggcttctgggccattctccttggttggccatgagctgattggttcccctggcctgtgccctgtggtcccggagtggctctgggatcgtgtggggcagccagcatggacagtggagatgctatcaaggccttcagtagggtgcagcccaggtttcttgcctgaacccagtgacccacctaccctgtgttttcagggtttgctgacagggaaggccaaacgtgccccacgtccatgctaggtcagtgttcctcatggaccccatcacatgggtatcccttaccccttccccacatggaagtatgaggctctgtttggacacatgtcctcttcctgtccccccagatggtgagcctggaggaagacttgcattgggcccaatggacccaggccagtggccatcagccaggtgcccaccctggtgtgctgaagcgcgggacctacctgttgtcctggtttcctacactgagctgaggtgagcacatctgggtccctctggatgcatgcatggggcggggggtgccctggtttgggtcaatgatgagaaccttatattatcctgaagagaggtgatgacttaaaaatcatgctcaataggattacgctgaggcccagcctaggtgagaatttggaagaggatgctgggatcccaaagtcccagtaggggactttatttatttattttgggctggagccctggaggccctgaagggcatctggggggcccagccctgtctctgtgctcctccgtgaggcagcccagcctccctgtgtgggcttgctgttggtggtccagttccttggggcggggcacgtggacagctcctccttgagcccccctgctccacttgtgtctttcagtgagctcttcaacccaggcggggcaccctggcattcaccagcataggtgagtggatcctgctgccatcgtgggccatgggccaggctgggtagagtcactgagggtcagccttcgggacaggagagtttcctcagggagcgaacctgaatccccaccagggagggataggttggtcctccagaagggtggcttcctgagaaatcggacccaagggggacgccttccctggagccctgcagtgatgacggtggtccaggcaggagagggttccttcagtctcacacatagtagctcccagctgagtctaggtgttcgagtctggccttgaggactgcccaggccacctgaggggccaacagggactctgggacaccatgggggtcacataggagctctccattcatggagaaagatggatgatagggcccatggagtcgagctgtggagatttaaggattgcgcccaatgtatggccctgaatgggacagaccctgttgagtaatgagccattctatgggcctcatcgagccttgagcggggcggtgctgtttccctatgtttgagtcaaggctggactctggccggtgcctggtggtgctgaggtctggccatggactcgttggctttgggccaaggggtcagcctgctccccctggaagtccccccttccccgtggctggaagtcatcccttcccaaggggcaagtgtcgggaatggttgcctcctgaggttgcaaggcctgctatctagggtcttgtctttggaatatgctgcccatgctgcttctgagtcatggggtcacctccagggtagcggatcttgggcccagggacagaagatgccgtgtgtcccctgattagctgattgtagccctgctctgtgttcaggaggtgtgtggggcatggatgcagacccaccagagaaaactgtggcccttagaccccaggttgcaatttccattatgtgctgggatagggcatctgggtgggcacccactatgcacagagataggctatgtgactgccagggctgtagcggcatctgacatctaggccagcttccttggtttcctgcgaatgagttggtggccctggcctgtgcctagtagttctggggtgaccccgggtcgtgtgggggagccagcaggggcccagtgaccagcctgccctgtccttccagagttctgtggctaagagagcactgggtaccctgtgtccgtgatgggccagtgttccgcatgcaaacgatcacatgggtccatggagggcaagcatacttgaactgccacaccccaccttctgctcacatacaggagtgaggttgtgtttggacagctgtcctactcctgttcccctagactgtgaaatgggaggaagaattgtgttgggcccaatggccctgggccagtatccgtcagcctggtgtccagcccctggtgtgctgaagctcatgcccttcctggtgccctagtttcctgcactgagcttggtgagcccatttgggtactgctggatgcatgggtggggagggaggtgccctgggttgggtcgatgatgagaaccttatattgtcctgaagagaggtgatgacttaaaaatcattctcaaaaggattatgctgaggcccaccctaggtgacaattttggaagaggacactggaaatcaatgaggtccctggcagggccactataatttggggtggagacctggaagccctgcagggcacctcgtgggggcccaaccctgtctcttcactcccctgtgaggcagcccaagctccctctgtaggcttggtgtcggcactctgctttcctggaggcggggcattttggctgctccttcctgagcccctgttctcccctgtgtctttcagtgagctcttttgcccagaagactccctggcattgatcggcataggtgagtgtctcctgcttgggtcatgggccatgagccagaccatagggttgccgagggtcagcatttgagccatgagggtttcctcaggaggcgacctgaatccccacctgggatgggttctccaggagggcagcttccttgtgaatctgagccaagtaagatgccttctctgaagccctgcaggggtgccagttgtgcaggcaagaaagggttccctcagccccaggcagggcagcgcccagcagagactcggtggttgggttaggcctctaggatgaccaggccacatgaggggggccacaagggctctggggcacaacaggggcttcgcagggtctctgcgaccccaaagagtggtgggcgattcggcccatgggatcgggccccagattcaaagatcacaccacacccatggccctgaatggaaccgaccctgttaagcattggggcatcccaggggtgccactttgaacctggtgtggggtgccgctgtttgcctgaggttgggtcgagactagctccggccagcacctgatggtggtgcagtccggccctgagattagtgggctgtgggcccagggtgcagcctgtgtcccgctgggggtcacctcttccttgtgggcgagtggtggaagggcatcctcctgaagtgggaaggcccgctgtggaaggaactgtcctggaaatttgccatccaggctgcttctgagccatggggtcgcctccagagtggcagggtcttgggcccaaggaaaggagaggacactgtgtttccctcaattagctgagtgtggccctgctctctgtgtgggaggtgttgtgtggggcatggatagggacccaccagagacaacacatggccctcgggccccaggctgcaatttctcagtgcatgcttggagacggtcctgggcctcctccatgcccagggtcaggctgtgcaactgtcaggttagcggcggcatgtggtgtctgggcctgtctacttcgttgtccgtgagctgctggtggccctagccctttcccaggggttcaggtgcagccctggggttgtgtgggacagccagtgtgggcagtggagctgctctggaggcctgctttagggtgcagcctgggtgtcttgcccgagtgtagtgacccgcctgccgtgtcctcacggggttccctagcaggaagggccaagggtcccctgtgtctgtgacacgtgagtgtttcccatgggtcccatcaaatgggtccacggagggagagcatgagtgaactggtaccccccacccccaccctcttccccacctggaggcatgagcccctggttggacatatgtcctcctcctgtacccccagatggcagcgctggaggaggacttgtactggggccgctggccccacatcagtgtccgtcatcccggcgtccagcccctggtgtgctgaagctcaggcccttccttgtgccctagtctcctgcactgagcttggtgagcccattcggatactgctggatgcatgggtcgggagggaggtgccctgggttgggtcgatgatgagaaccttatattgtcctgaagagaggtgatgacttaaaaatcattctcaaaaggattatgctgaggcccggcctaggttagaattttggaagaggatgctgggatcctgaggtccccaggagagcccctttatttttggctggagacctggaggccctgaagggtatctggggggcccagccctgtccctatactcctctgtgaggcagcccaggctctctgtgtgggcttggtgttggcactctggttttctgggggcggttcaggttgctggttccttctgaaccattgttctccccttgattctttcagtgagctcttctgctcaggcgggtcccctggcattgaccagcataggtaagtggatcctgctgggttcatgggccatgagccagaccacatggagtgactgagggtcagccttcaggacaggaagatttcctcggggagccaacctgaatccccaccgtggagggatgtgttagtcctccaggagggtggcttcctagggaatctgaccccaggaggacacctttgctgaagccctgcaggggtgatggtggtccaggctggaaagttttccttcagtctcatgtggggcagctccctgctgacattccgtgcctgcgtctgaccttgaggactgcccgggccacatgagtggggcaacaagggctccagggtgccacggggattatgagtggggctctccatccccggagagaggtgggcaatcaggcccatgtggtcaggcttgtagggttcggtggtggggagagccaaggtttccctgggtccattaccgtcactgtttcacctggatcccatcacatgggtccatggagggagagcatgtgtgaacaggcaccccttgctccctttcccacatgagcccctggttggacatatgtcctcctcctgtccccccagatggtggccctggaggaggacttgtattggggccactggccccacgtcagtgttcgtcagcctggcatccagcccctggtgtgctgaagctcaggcccttcctgttgccctagtctcctgcactgagcttggtgagtccattcggggactgctggatgcatgggcgggtagggaggtgccctgggttgggtcgatgatgagaaccttatattgtcctgaagagaggtgatgacttaaaaatcattctcaaaaggattatgctgaggcccggcctaggttagaattttggaagaggattctcggatcctgagatccccagccaggccactgaatttttggctggagtccttgaggccctgaagggtgtctgagggctgctgaaacctgtctctgtgcttgtccgtgaggcaacccacattcgctgtgtggacttggtgttggccttcccgttctccggggatgggacatactgtcagcttgtccctgagtacccgttctcccctgtgtctttcagtgagctcttctgcccaggtggtccccctggtcttgatgggcataggtgagtacatcctgctggtgtcctggtccatgagccagggtgcgtacggttgccggaggtcacctttaggccatgtgggtttcctcagggagctgacctgaatccccactgggagggatggtttctccaggaggatgtcttccatagaaactggttccaagaaggatgccttccctgaagctgtgcaggggtgacgatggtccaggcaggaaagggtccattcaacccaatgcagtacagcttctagctgagactcggtgcacgggtgagggcttgaggactcccaggcaacatgaggggttccacaggatctccggaggccacaggtgttaagcaggaactctccatccttgaggcttgctgggggtggcgggatggcagcagggtgtgggtgatcgagtttatggattcaggccaagattcaagggtcaggccccacccattgccctgatgggaccaaccctgttgtgcaatgggctgtcccactggtgcctccttgagcctggtgtgggcagcgtggcttcaatggggttgggtcaaggctgagctctggcccgcacctggtggttggccctgggaattgtggactttgggccaagggtgcagcccgcctgcctctggaggtcatcctacccagaggtggagtggccggaagggtggcaggcatcctgtggtgaaaggcccactgttgagggtcctgtcccaccaatttgctgttcaggctgcttctaagccatgggttcacctccagagaggcgggatcttgagcccagggaaaggagagggcatcatgtgtcccctgattggctgagaatggggagagtgtttgggtggtatgtggtgcatgaatggggacccaccagagaaggcgcgtggccctgggccccaggatgcaatttccggcgtgcttatagagggcgtctgagtggacactctccatgcccaggcgcaggctatgtgactgccaggtctgcagcagtttgtggcatctgggctagcctccttgattgcttatgagctggttgatagccctggcctgtgccgaggggtcctggtgcggccctggggttgttcaggggaagccggcatgggcagtggaggtgctcttggggcctgcagtagggcacagcccaggtgttcttgcttgagcgcagtgaaccacctgccctttccttccagggttcggtagcagggagggccaagggtcccccacgtccatgacaggtcagcgttcctcctggatcccatcacatgggtacatgcagggagagcatgtgtgagccggcactccccactctcttccccgcattgcagggtgaggccctgtttggacccatcttccagctatctcaccagatggtgagcccagaggaagaccccgtggctctgggccagtgtgcgtcagccaggtccccagcccccagtgtgctgaagctcaggcccttcccaacgccctggtctcctgcactgaggtgtggtgagcacaaccaggtcccactggatgcatgcacagggagggatgtgccctaggttgggtcgatgatgagaaccttatattgtcctgaagagaggtgatgacttaaaaatcatgctcaataggattatgctgaggcccagtctaggttaaaattctggaagaggatgctgggatcccaagttcacaggcagggccactgtattttggactagagaactcgaggccctaaagggcatcttgagggggtccaacctgtctctgtgctcctccatgaggcagccctggctccctgtgtggccttggtgttggtgctctggttcccaggcgtggcatgtgggcacctccttccagagcccccattctcccctgtctctttcagtgagctcttccgcccatttgggccctctgacattgaccggcataggtgagtggatcctctttgggtcatgggtcatgagcgaggcaaagtggggtcaccatgcatctgccttcgggccatgagagtttcctaaaagtgtggacctgaattcccaccggggatgagttatccagaagggccacttccttgggaatcggacccaagaaggacgcctgtcctgaagcccagcaggggtggtggtggtccaggcaggaaagggttcattcagcaccaagcaggcagctcccatctgagacttggtgcatcggtcaggccttgaggactgcccaggacacatgaggtggccacaggggctccggggcactacagggggtctgcagagaggggtaggcgattgggtccgtgggggtcatgccgcggagtttcaaggacacccatggccctgaatgggactgaccctgttgagtaatgggccatcccaatggcacctccttgagtctggcggtgggtggtgctgtttccctggggctaggtcaaggctgagctctggctagtgcctgtggtgctgcaggctggccctagaactcatgggctttgggccatggggacagcttgtgtcatgcttggggtcaccccttcccggaggttgaatggcgggagtggtggcttcctaaggtgggaagtcctgctattgagcaacctgtcctgggaatttgccacccaggctgcttctgagacatgaggtcacctccagagtggcagcatcttgggtccaaggaaagaggagcataacatgtgtccccagattggttgagtgtggcctagctctgtgtttgggaggtgtgcagggtgtggatggggatgtatcaaagaaagtacatagccctggagccccaggctgtgatttccagtgtgtgcttggagaggggcaggagcaggctctcgactgccaggtctgcagcagcgcgtggcatccgggcaagccttctggttggccatgtgctggttggtggccctggcctgtgcccagtggtctcagggtagacctggcattgtgcagggcagccagcagggcagtggaggtgctctcaggacctgcagtagggcgcagcctggactttttgtgtgagaccagtgacccacctgcactgtccttccagggttgggtggctgggagggccaagggtggtccatgtttgtctccgtgacacatcagtgctctgcatggatcctatcacatggatatcccctacccaccttccccacatggaagcatgaggccttacttggacatgtgtcctcctgtcctagatggtgagctcggaggaagacttgcattgggcccaatggagctgggccagtttctgtcagccaggtccccagctcctgatgcactgaagctcaggcccttcctggagccctggtctcctgccctgagctgtggtgagcccatctgggtcccactggatgcatgcatgggagggggttgccctcggttgggtcgatgatgagaaccttatattttctgaagagaggtgatgacttaaaaatcatgctcaataggattacgctgaggcccaacctaggggagaattttggaagaggacgctgggatcctgaggtccgtggcagggccaccgtattttgggctggagacctcaaggccctgaagggcatcttggcagcccccagccctgtctctgcactcctccgtgaggcagcccaggctccctgtgtgggcttggtgtcagagtcccattccccaggggcggggcaggttggcggctcctccctgagtcccctttctcccttgtgtctttgagtgacttcttctgcccaggtgggccccctggcgttgaccagcataggtgagtggaacctgctggtgtcatgggccatgagccaggccatgtggggactccaggtcagccttcaggacaggagagtttcctcagggagcaggggaatccccactggggagggatgggttctcccagagggccactttcttttgaatcggacccatggaggacatcttctctgaagacctgcagaagtgatgatgtttcaagcagcaaagggttttttcagcccctgcagggcaggcagctcccagatgagattctgtgcatgggtcaggcctcaagaactgcccaggccacatgcggggtgccacacaggctgtgaggcaccacaggggtcatgcaggagctctcggtcttcaggcttgttgtgggggtggtgacagagtgatcaggcccacagggtcaggctgcagtgtttcaaggatcgcgcccacctgtggccctgaatgggaccgatgctgttgagcaatgagccatcccagtggctccacattgagcctggtgggggcgccactgtttcagtggggatgggtgaagcttgagctctggccagcacctgatggtgttgcaggctggcccagggacttgtgggctttgggccaggtcggcagcctgagttctgctgggggtcacatctttcctgagtttcagtgtcaggatgcatggcctccttaggtgggaaggcctgctgtggagggtcctgtcctgggaatttgctgcccaggctgcttctgagccatggcgtcacctccaggtggtggggtcttgggcccaaggagcagagaagacaccatgtggcccctgattggtcgagtatggcctggctctgagtttgggaggtgtgcagggcatggatggggacccaccagagaaagcacgggccaatgaagccccaggctgcgatttctgatgcgcacttggagagggcgcctggttgggcgcccaccatgcccaagggtaggctatgcaactaccaggtctgcggcagtgcctggcatcaggaccagcctcctttgttggctgtgagctggttggtggccctagcccgtgtccagtgatctctgtgcagccctggggtcatgtggagcagccagtgtaggcaggggaggttatcttgaggtgtgcagtaggcacatcccaggcatcttgcccgagcccagtgacctccctgccctgtccttccagggttcggtggcggggaggcccaagggtaccctgtgtccatgacaggtcagtatttcatgtgaatcccatcacatgggccctcctcctgtccccccagatggtgagcctggaggaagacttgcactgggccttctgtgcgccggccagaggccatcaaccaggtgcccaggtccttttgtactgaagcttgggcccttcctggcaccctggtctccttcatggagctggtgagcccatccgggttcttctggatgtatgcatggggagcggggtgcactgggttgggtcaatgatgagaaccttatattgtcctgaagagaggtgatgacttaaaaatcatgctcaataggattacgctgagtcccagcctaggtgacaattttggaagtggacactgagaatcacaaggaccctggcagggccactgtattttgggctggagacctggaggccctcaagggcctctcacagggacccaaccctgtctctgcactcctccgtgaagcacagcaggctccctgtgcggacttggtgttggcactgtttcccaggggcagggcacattggtggcttttccctgagtccccattcttgccttgtgtctttcagtgagctcttcagctcagaagggccccttcaccttgattagcctaggtgagtgcatcctgctggtgtcatgggccatgagtcaggccgcgtggggtcaccaagggtcagtctttaggacaggagggtttcctcagggagccaacctgtatttccaccggggagggatggtttctacaggagggcggcttccttgggaactggacccaagatgttgccttcctgaagccctgcagggatgacagtggtccaggcagcaaagacttccttcagccccgtgcaggagagctcccagctgagactcagtgcatgtgtcaggcctcgaggattgccgaggccacatgatgggggccacagggcctccggggcaccacgggggtcatgcaagagttctctttccctggagaggggtgcttgaatgagcctatgggattgggccgtggagattcaaggattgtacccaactatgtcccaaaatgggactgaccctgttgagctatggaccatcccatggtgcctctttgagcttggtggggggcagtgctgtttccctgggtttgggtcaaggctgagctctggccagtgcctggtgaggctgtgggccggacctgggactcgtgagctttaggccaagtcgacagcttgtgtcctgctggaggtcaccccttccccatgggtgagtggctggaagagtggaatgtgcggtgggaaggcccgctgttgatggtcctatcctgagaatttgctgcccagactctctgtgccatggggtcatgtccagggtggcagggtcttgggcctagggaaaggaaaggacaccatgtggcccaggattggccaagggtggcccggatctgtgtttgggacatgtgtggggcatggatggggacccaccagagaaagcacatggccctggtactccaggctgtgatttcaggtgtggcttggagagagtgcctgggcaggtgcccaccatgcccagcggcaggctatgcaacttccatgtccacggtggcacatggcttctgggccaggctcctcggttggccatgagcatgtcggtgaccctgtcccatgctcagtggtcctggggcagccctgggatcgtgtgaaggagaagtcagagggggcactggatgtgccctcaaggtctgcaatagcatgaagaccaggggtcttgcccaagcccagtgatccacctgccctgttttttcagggtttggtgatggggagggccgagagtgccctgtatccgtgacaggtcagtgttccacatggatcccatcacatgggtatcccttaccccattccccacctggaggtatgaggccctgtttggacacatgtcctcctcctgtccatccagatggtgagcctgaaggaagacttgcatcaggaccaatggaccctggcaagtgtccgtcagccaggtgctcagcccctggtgcactgaagctcaggcccttcctggccccttgatctcctgcactgagctgtggtgagcacatccgggtcccgctggatgtatgtgtgggcagggggggtgccctgggttgggtcaatgatgagaaccctatattgtgttgaagagaggtgatgacttaaaattaccatgctcaatgattacgctgaggcccaacctaggtgagaaatttggaggaggatgctgggatcccgagatttccggcagggccactgtattttgggctggagccctggaggccctgaaaggtatctggaggaggcccaactctgtctctgcactcctctgtgaggcagcccaggctccctgtgcgggcttggtgttggcctttctgttccccagtgaagtggcacgtgggtggctcctccctgagccccagttctccccttgtgtctttcagtgagctcttctgccaagggggggcctcctggcattgaccaacataggtgagtggatcctgctggcatcatgggcatgggttcactgagggtcagacttcaggccatgagggtttcctcagggagctgaccccaattcccatcagggagggatggtttctccaggagggcggcttccttgggaatcttacctgaggaggatgccttccctgaagatctgcaggaatgacaatggtccagatagcaaagggttccttcagccccatgcaggacatcgcccagttgagacttggtgtgcaggtcaggccttgaggactgcccaggccacatgaggcgggccagaagggctccagggtgccacgggtttcacttgggagctctcggtccccgggcatgttcctggggggggtggtgatggggtcgggccatggaggttcaaggatctcatcccacctgtgaccctgaatggggctgatcctgttgaacaatgggccatcccagtggcacgtattgagcctggtcaggggtggtgcagtttcaatggggttgggtcaaggttgagatctggccagctcctggtggtgcttcaggccagtcctgtgacccatgggctttgggctaagggggcatcccatgtcccatgggggtcacctgttctccatgtttgagtggcagtaacagtggcattctgaggtgggaaggtccactgtctagggtgttgtaccgggaatttgccaccccgccttcttagccaaggggtcacctccagggtctcgggatcttgggcccaaggaaacgagaagataccatgtggcccttgattggccgagtgtggcccagctctgtgtttgagaggtgtgggatatgaatggggtcccaccagtgaaagctcatggcccaggtccccaggctgtgatttttagtgcacacttggggagggctcctcagtgggtgcccaccacgcccagaggcaggctatgtgactgccaggtctgcaacggtgcatagcttccaggctaccctccttggttggctgggagcgggttggtggccatggcccatgcccagtggtcacagggcaaccctgggatcatgcaggggagctggtgagggcagtggaggtgctctccggaacggaagtatggctcagcccaggtatctggcccaaacccaatgaccagcctgccttgtttctcagggtttggtgatggggagggccaagggtgccctgcatctgtgatgggtctgttccacatagaacccattacaggggatcccttctccacatggagatgtgaggccctatttggacacatatcctcctcctgtccccccagatggtgagcctggaggaagatttgcattgggcccaatggccctgggccagtgtctgtcagccagtttcccagcccctggtgcactgaagctcaggcctttcctggcatcctggcctcctgcactgagctgtggtgagtatatcatggtcctgctggatgcatgtgcagggagggaaggtgccttgggttcagtcagtgtcgagaaccttatattgttctgaagagaggtggtgacttaaaaatcatgctcaataggattacgctgaggcccagcctagttgagaattttggaaggggacagtaggatcccgaagtccctggcagggcccttatattttaggctggagacttcaaggccctgaagggcacctggaggtggctcaacctgtctctgtgctcctccatgaggcagtccaggctccctctgtgggctttctgttggcactctggttccctgggccagggaacgttggtggctcctccctgagcccctgttctccccttgtgtctttcagtgagtgcttctgcccaggcaggccacttggcattgaccggtataggtgagtggatcctgctggggtcatgggtcatgagcaaggccacatgggtcgccgagggtcagccttacagccataagggttttctcagggagcccacctgaattcccaccggggaggcataggttctccaggagggcggcgttttggggaatcagacccaagggggacaccttccctgaagccctgcaagggtgatggtggtccaggcaggaaagggtttttttcagccccacacaaggcagctcctagctgagaatcggtgcttgggtcagacctcaaggattgcccaggccacatgagggcgactgagagcctccggggcaccacaggggtcacgtgggagctctcggtgcctggcgtgtgatgcacaaatggacctcttgggtttgttcatggagattcaaggatcgcaccccaccatgcccctgaatgggatggtccctcttgagaaatgggccatcccagtgggtctcctggagcctggttggggggtggcattgtttccctggggttgggtgaaggcagagttctggccggcacctggtggtgctgcaggtcagcactgggacccgtgggcgttgggccaaaggagagcccgaatcccactgggggtcaccctttttccaacatcaaatgtctggaagggtggcctcctgaggtgggaagtcctgctgttgagggacatgtcctgggaatttgtcactcaagcttcttctgagctttggtgtcacatccagggtggcagggtcttgggtccaagcaaagcagagggcaccatgtgtctcctgattggccaagtgttgctggctctgtgtgggaggtgtgcagagtatggatggggacccacgagagaaagcacgtagcactgcaactccaggctatgatttctgttgcatgcttggagagggtgcctggacaagcgtgccatgcccaggggcaggctgggcaactaccaggtcttcagcggagtgtgacatctgggccagcctccttggttggccgtgacctggttggtggcccggctctgtgcctactggccccagggcagccctgggatcatgcaggggagccattttgaacagtggaggtgctcttggggcctgtagtatggcacagcctaggtgttttgctcaagcccagtgacccacctgccctgtcctctccgggatcggtggaagggagggccaaaggtgctccgtgtacttgatgagtcagtatttcacattgaactcatcacatgtgtccatggagggtgagcaagggtgagatggcactgctgacccccttccccacgtagaggtcagtttggacacttgtcttcctcctgtctccccacatggcgaccccagaggaaaacttgtgttgggcccgctgtcactgggccaatgtcagtcagccaggtgcccagcccctggtgcgctgaagcttgggcccttctggcacccttggctcctgcactgagctgtggtgagcccatctgggtcctgctggatgcatgtgcagggagggggatacctgggttaggtcgattatgagaaccttatattgtcctgaagagaggtgatgacttaaaaatcatgcccaataggattacgctgaggcccagcctaggtgagagttttggaagaggatgctgggattctgaggtccctgacagagtaaatgtattttgggctggagaccttgaggccctgaagggcatctggtgggcccacccctatctctgtgctcctccgtgaggcagcccaggctccctgtgctggcttggtatctgggctccggatccctggttatggggcatgttggagtctccttcctgagtccccgttctcccctgtgtcttttggtgagctcttctgcccaagtggtccccgcggccttgagcggcataggtgagtgcatcctgtttcggtcatgggccatgagtgatgcagcatggggtcctcgacattcagccttcgggccactagggttttctcaggctgccaacctactccccaccagggagcaatggtttctccaggagggccacttccttgggaatctgacccaaggagcacatctttcctgaagccctgcaggggtgacagtggtccaggcagcaaagggttccttcagcccaatgtagggcagctcccagctgaaactcggtggacagctcaggcctggagtactgtccagggcacatggggaggaggggcacagggaatgtggcgcaccctagaggttacactggagttctctctccctggagaggggtgagtgattgggcccacacagtcaggctgtgaagattcaaggaatgctccacacccatggccttgaatgggaccaaccctgttgagcagtgggccatcttatggtacctccttgagtctggtgagggatggcactgtttcagtgaggttgggtcaagactgagctctggctggcacctggtgctgctgcaggccctgggacttgggggccttcagtcaagggggcagctctgatcctgctggggacaaaccttccttgaggtccagtggtgaagagtgtcctcctaaggtgggaaggcctgctgtcaagggaatttgccacccaggctgcttctgagccttggggtcacctcagggtggcagggtcttgtgcccaaggaaaggagaagacaccatctggttcctgattggctgagtgtagccgggctctgtgtgtcggagttgggcagggcatggatggggacccaccagagaaagtgtggcccaggggccccccaggcttggagagggcaccagggccggtgcccacaatgctcaggtgctggctctgggagggccaggtctgcagcggcttttggcatctggccaaccaccttggttggccaggagctggttgatggccctgtcctgtgtcctgtgccctgtgccctgtgtccctggtatggccctggggtcatgtgtgggagctggcctgagcagtggaggtgctcttggggcctgcagtagggtacagcctaggcatcttgcctgagccagcactgtcttttgctttccctgtctttccagggtttggtggcagagagggcaaaggatgccccacatctgtgttgggtcagtgttcagcatggatcccatcacatgggtatcccttagccccttccctgcattgatatgtgaggccctggttggacacatgtcctccttctgtccctctagatggtgagcctggaggaagatgtgtgggacccgcaggccgagggccagtgtctctcagccaggtgctcagcccccagtgggctgaaactctgacccttcctggcaccctgctctcctgcactgtgctgtggtgagcacatccgggttccactggatgtttgtgcagggagggggttccctgggttgggtcaatgatgagaacagggccacatgaggggggccagaggggctacagagtgccatggggtaacaagggagctcttggtccctggagtgtggtgtgtgaatgggcccatggggttgggtagcagagattcaaggatcctgctctacccatggccctgaatgtgaccatcgctgttgagcaatgggccatcccagtgggtctcctggggcctggttggggggcggagttgtttccctgggattgggtcaaggttgactctggctggcacctggtggtgttgcaggtcagccctgggactcatgggctttgggccagggacagcccgcatcccgctgggggtcacccaagtgttgtgaagggtggcctcctgagttgggaaggcccgctattgaggcatctgtactgggaatttgttgctcacgctgcatgggagccatggtatcacctccagggtggcagtcttgggaccaagcaaaggagggggcagcatgagactccggattggctatgtgtgactggctatgtgtcttggaggtatgtggagtatggatggggacccaccagagaaaacaagtgaccctgaggccccatgctgtcttttctggtgcctgcatggagagggtgcctgtacgcatgcccaccatgcccaggggcaggctgtgccactgtcaggtctgcagtagcatgtggcatctgggccagcctccttggttggctgtgacctggctggtggcccggacctctgcccagtggtcccagggcagccctagggtcatgcggaggagcagttttggccagtggaggtgcccttgggtcctgcagtcgtgcataccctgggcgttttgcctgagcccagtgacctacctgccttgtccttcccgggttcggtggcagggagagacacttgcataggtgatgagtcagtatttcgcatggatctcatcacatgtgtccatggagggggagcaagcgtgagctggcacccaacacccctttctccacatggagggtggtcacatgttctccacctgttcccctagatggtgagacttctgttgggcttgcttttcctgggccagtgtccatcagccaggtgctcagccatcggtgcgctgaagctccagcccttcctggtgccctgatctcctgcactgagctgtgatgagtacatccgggttccactggatgcatgtgcgggaaggggggtgccctgggttgggtcagtgatgagaaccttatattgtcctgaagagaggtgatgacttaaaaatcatgctcaataggattacgctgaggcccagcctgggggagaattttggaaaaggatgctgggatcccagggtccccaacagggccactgtattttggacctgggacctggtggctctgaagggcatctggaggtggcccaacctgtctctgcactctagtttccctgtgtgggcttggtgtcggtgctccagttccctgggggcagggaatgttgatggctccttcctgagtccctgttctcgcctttgtctttcagtgagctctttcacctaggagggccccttggcattgactggcataggtgagtggatcctgctggtgttatggatcatgagccagaccatatggggtccccaaggatcagcctttgggccacaagggttttctcagggagctgacctgaatttccacctgagacggaaaggttctcctggaaggcaggctttttggaatcggacccaaggaggacaccttctctgaagccctgaaggggtgatggtggtccaggcaggaaagggttccttctgcctaacataggacagtgcctagttgagactcggtgctgcagtaaggccttgaggactgcccaggctacatgaggggggccagaggggctacggggcaccacagggttaatggtgacctcttggtccccagagtgtggtgcgtgaatggacccatggtgttgggttgtggagattcaaggatagtgccccacctatggccctgaatgcaactgtccctgtttagcaatgggccatctcagtgggtctcctggagcctggtggggggcagagttgtttccttgtgactgggttaaggtagagctctggccagcacctggtggtgtggcaggtcagccctgggactcttgggcttttgaccaaggggcagcctgtatcccgctgggggtcatcctatctctgaggtcaagtgtcgtgaagggtggcctcctgaagtgggaaggctcgctgtcgagggacctgtcctaggattttattgctcaggctgcttctgagccatggtgtcacctctagggtgatggggtcttgggaacaagcaaaggggagggcaccatgttgctccggattgggcaagtgtggcccagctctgtgtgtgtgaggtgtgcagaacatggatggtgacccaccagagaaagcacatggccctgtagctctaggttgtgatttccgtgcacacttggagacagcatcttgatgtgtgcccaacacgcccaggggcagactatgcgatagccaggtctgcagcggtgtgtggcatctgggccagccacctttgttggccatgagctggctcatggccctgacccatgcccactggtgtcagggggccctggcgtcgtgtgaggagccatctgtggcagtggaggtagactcagggcctgcagtatggcgcaacccatgcattttgcctgagctcagtgacctacctgccctgttcctccagggtttggtggcagggggagccaagggtgccccacattggtgacgagttagtacttcacatggatctcataacatgtgtccgtggagggcaagcaaatgtgagcccgcacccactactgccttccccacatggaggtcagtttggacacatatcatcctgctgtcccccaaatggtgagaccgaagaagacttgccctgggccctctgttcttgggccagtgtcagtcagccaggtgcccagctctaagtgcgctgaagcttgggcctttcctggaatgctcggctcccgcactgagccagggtgagcacatccgggtactgctggatgcatgtgtggggcaggggtgcgccctgggttgggctgatgatgagaaccttatattgtcctgaaaagaggtgatgacttaacaatcatgctcaataggattacattgaagcccaggataggtaagaattagggaagatgatgcagggatcccaagatctccagctagaccacacttattttgcactggagaacttgagaacttgaagggcatctcaggggagcccaaccctgtctctgagctccttcgtgaggcagcccaggctccccttgcgggcttggtgtctgtgctccgcttctccagggacagggcaatttggtgttccttcctgaatgctccttcttccctgtgtccttcagtgagctcttctgcccaggtggggtccctagctttgagcggcataggtcagtgcatcctgttggggtcatgggccatgagtgaggcagcatggggttggtgagagtcagccttcaggccactagggttttctcagggagccaaccgattactcaccgggagggatggttcctccaggagggtcacttcttgggaatctgaccctaggagcacacatttcctgaagctcggcagggagatggtggtccaggcaggaaagggttccttcaacctaacgtagggcagttcccagctgaaactaggtgggcaggtgaggcttgaggactgcccagtccacatgaaaggggccacaggggctttggggtgccctgggagtcatgctggagttcttcccccaagagggatgggtgatagggtccacgtggtcaggctgcggagattcaaggaatgccacccacccatggccctgaatgggaccaaccctgttgagcaatgggccattttcggcatgtttcaatgcagttgggtcaaggctgagcgctggctggtgcctggtggtgctgcaggccggccctggggctcatgggctttatgccaagggggcaactcccatcccactggggtaatcccttccttgaggtccagtggtgggaagggtggcctcctgaggtgggcagacctgctgtcaagggacctgtcctgggaatttgccacctaggctgcttctgagccatggggtcacctccaggatggcggggtcttcagcccaaggaaaggagaggacaccatgtggtttctgattggctgagtgtggcctggctgtatgtgtgggaggtgtgcagggcatggatggggactcatcagagaaagaatgtggccctggaggcccccaggctttgatttctggtgtgtgcttggagtgggcaccagggtggccctaccatgcccaggggcaaggtctttgcctgccaggtctggagtggctcctggcatcaggaccaccctccttggctcaaccaaccttcagcaggttggctgccttggcccgtgccccatggtcccggtacgaccctggggttgttcgggggatctggcccaggcagtggaggtgctcttggggcccacagtagggcacagcccaggcctcttgccccagcccagtaacccacttgccctgtctttccagggttttgtggcagggaaggccaagggtgctctgcgtccatgttgggtcagtgttctgtaaggattccattacaagggtatcccctacccaccttccctacattgatacatgaggccctggttggacacatgtcctcctcctgtccctacagatggtgaccctgaagaaagacttcagttgggcctgaaggccccgggccagtgtccatcatccaggtgctcagctcccagtgcactgaagctcagacccttcctggttccctggtctcttgcactgagctctggtgagcacaactgggtgctgctggatgcatgcatggggaggggggtgccctgggttggggtggtgatgagaaccttgtattcttctgaagagaggtgatgacttaaaaaccatgctcaataggattacacttaggccgaacctaggtgagaatgttggaagaggacgttgggatcctattatccctggcagagccactgtattttgggctggagacctggaggccctgaaagggcatctggagggggcccaaccctgtctctgtgctcctgcatgagggtccccaggctccctgtccagccttggtgttggtgctctggtaccctggggatggaacaagttggtggctctttcctgagcccccattctccctttgtgtctttcagtgagcttttctgcccaggtgggcaccctggcattgattagcctccttggttgtccatgacctggctggtggcccgatcctgtgcccagtggtcccagggcagccctggcatcatacggggcagctgttttgggcagtggaggtgctctccaggcctgaagtatggcacagcctgggcattttacctgagaccagtgacctgcctgccttgtccttcctgggttcggtggcagggagggccaagggtgccctgcgtcagtgatgagtcagtattttgtgtggatctcatcacctgtccatggagggaaagcaagcatgagctggcacccaacacccccttctccgcatggagggtggtcacatgtcctccacctgtgcccccagatggtgagacttgaggaagacttccactgggcctgcttttcctgagccagtgcccatcacccaggtgctcagtccctggtgcactgaagctccagcccttcctggcgccctggtctcctgaactgagctgtggtgagcacatccgggtttcactggatgtttgtgcggggagggggttctctgggttgggtcaatgatgagaaccttatattgtcctgaagagaggtgatgacttaaaaatcatgctcaataggattacgctgaggcccagcctaggggagaattttggcagaggatgccgggatcccaagatttccgggagggccacttgtattttgggttggagacctggaggccctgaagggcgtctggaggtggcccagtgctttctttgcgctcctctgtgaggcagcccaggctccctttgtgggcttggtgtttgcgctcctcttctccagtgatggggcacgttgggggctcctccctgagtcctggttctccccttgtgtctttcagtgagctcttctgccaagcggttcccctggcattgaccaacataggtgagtggatcctgctggcatcatgggctatgagctaggccgcatgggtttgctgagggtcagacttcaggccccaagggtttcctcagggaaccgacctcaattcccaccatgtgactgccaggtttgcaacagtgcatagcttccgagctaccctccttggttggccgggagctggttggaggctgtggcccatgcctagtagtcacagggcaggcagactgccctgttttttcagggtgtggtgacggggagggccaagggtgccctgcatccatgatgggtcagggatttcaggagggatggtttctccaggagggcagcttccttgggaatcttacccaaggaggatgtcttccctgaagccctgcaggggtgacgatggtccagatagcaaaggtttccttcagccccatgcaggacatcacctagttgagatatggtatgtgggtcaggccttgaagactgcccaggccacctgaggggcccagaagggctctggggtgccacaggtgttatgtaggagctctcagtccccagacttgtttcgtggggttggtgacggggttgggttgtggaggttcaaggatttcatcccacctgtgaccctgaatggggccaaccctgttgagcaacaggccatcccaatggcacgtattgagcctggtggggtgtggtgcagtttcaatagggttgagtcaaggctgagatccatctggtgcttggtgctgctgctggccagccctgggacccgtgggctttgggctaagggggtagcccacatcctattgagggtaacccattctccgagtttgagtaacggttaacagtggcattctgaggtgggaaggcccactgtctagggtcctatactgggaatttgccaccccgggttcttctgagacaagtggtcacctccagggtcatggggtcttgggcccaaggaaaggagaagataccatgtggcccttgattggctacatgtggcccaggtctgtttgggaggtgtgtgggatgtggatggggtcccaccaatgaaagcacatggcctgggtccccaggctgtgattttcagtgcacacttggagagggtgcctcggcgggtacctaccacatccatgggcaggctatgtgactaccaggtttgcaacagtgcatagcttccaagctaccctccttggttggtcgggagctggttggaggctgtggcccatgcctagtggtcacagggcaggcagacggccctgttttttcagggtatggtgatggggagggccaagcatccatgatgagtcggtgttccacatggaacccattacgtgggtatctcttaccccttcctcatatggagatgtgaggccctatttggacacatatcctcctcctgtacccccagatggtgagcctggaggaagacttgcgttgggcccaaaggccctagaccagtgtctgtcagccaggttcccaacccccgatgcgctgaagctcaagcctttcctggcaccctggtctcctgcactgagctgtggtgagtatatcctggtcctgctggatgcatgtgcagggaggtgggtgccttgggttgggtcaatgatgagaaccttatattgttctgaagagaggtgattatttaaaaatcatgctcaataggattacgctgaggcccagcctagttgagaattttggaggaggacactgggataccgaagtcccccgcagggactctgtattttgggctggagaccttgaagccctgaagggcatctggaggtggcccaacctgtctctgtgctcctccctgaggcagcccaggctccttttgtgggcttggtgttggggctccagttccccaggtcagggaatattggtagctctttactgagcccctgttctccctttgtgtctttcagtgagctcttctgcccaggcgggccccctggaattgatgggtataggtgagtgcatcctgctggggtcatgggccatgagccaggccacgtggggtcaccaggggtcccccttctggccatgagggttttctcagggaaccgacctgaattaccactggggaggcataggttctccaggagggcggctattttgggaatcggatccaagggggacaccttccctgaagccctgtgggtgtgatggtggtccaggcaggaaagggtcccttccaccccacacagggcagctcatagctgagagttgatgctcaggtcaggcctcaaggatttcccaggccacatgagggggacagaggagctctgggtgccacgggggtcacataggagctctcagtattcggtatgtcatgcacaaatgggcctcttgggttggattgtggagattaaaggatcgcgcaccaccgtggccctgaataggaccatccttattgagcaatgggccatcccagtgagtctcctggagcctggtggaggggagggggtggcattgtttccctggggatgggtcaaggcagagctctggccagcaccttgtggcttctgcaggtcagccttgggactcatgggcattgggccaagggggagcccgcgtcccactgggggtcaccctttttccgacgtcaagtatctggaagagtggcctcctgatgtgggaaggcctgctgtcgagggacgtgtcccaggagtttgtcgctcaagtttcttctgagctttggggtcacatccagggtggcggggtcttgggcccaagcaaagcagagggcaccaagtgtctcctgattggccatgtggctgtctctgtgtgtgggaggtttacagagtatggatggggacccaccagaggaagcacgtggccctgcagcaccaggctgtgatttctgttgcacacttggagaggttgcctggacacgtgcccttcatgcccagtgacagactatgcaactaccaggtctgcagcagggtgtgacatctgggctagcctccttggttggccgccacctggctggtggcccggatctgtgcccaacagtcccagtgcagcactggggtcatgcaggggagctgttttggacagtggaggtgctctcggggcctgcaatatgatgcagcctgggcgttttgctcaagcccagtgacccacctgccctttcctttctgggttcagtggaagggagggccaacagtgtagtgcgtacttaacaagtcagtatttcacattgaactcatcacatgtgtccatggagggcaagcaaaggtgagctggcacccccgacccccttccccaaacggaggtcagtttgggcacacgtctccctcctgtctccccagatggtgaccccggaggaaaatttgtgttgggcccactatccctgggccaatgtcagtcagctaggcacccagcccccagtgcgctgaagctcaggaccttcctagtgccctcggctcctgcactgagctctggtgagtccatctgggtcctgctggatgcatgagctgggggcgggagggtgccctgggttgggtcagtgatgagaaccttatattgtcctgaagaaaggtgatgacttaaaaatcatgctcaataggattacactgaggcccagcctaggtgataattttggaagaggatgctggaattctgaggtccctgacagagcagctgtattttgggctggagaccttgaggccctgaagggcatcttgtgggcccacccctatctctgtgctcctctgtgaggcagcccaggctccctgtgctggcttggtatccgggctctgggtccctggtgacggggcatgttggaggctccttcctgagcccctgttctcccttgtcattcagtgaactcttctgcacaagtgacccccccagccttgagcggcataggtgagtgcatcctgttttggtcatgggccatgagtgatgcagcatggggtccctgacattctgcctttgggccaccagggttttctcaggctgccaacctactccccaccagggagcgatggtttctcaggagggctgcttccttgggaatctgacccaaggagcaagtctctcctgaggccctgcaggggtgacagtggtccaggctggaaagggttccttcagcccaatgtagggcagctcccagctgaaactcagtgggcaggtcaggcctcgagtattgcccaaggcacatgggggagtgaggcacgggggatacagtgcgccgtggaggtcacactggagttctcccctccctggagagggatgagtgactgggtccacacggtcaggctgtggagattcaaggcatgctccacacccatggccttgaatgggaccaaccctgttgagcaataggccatcttagtggcacctccttgagcctggtgggggacggcactgtttcaatgaggttgggtcaagagtgagctctggctggcacctggtggtgctgcaggccctgggacttgtggactttgggccaagggagcagctctgatcctgctggggacaagccttccttgaggtccagtggtgaaaagagtgtcctcctgagatggcaaggcctgctgtcgagggacctgttctaggaatttgctgcccaggctgcttctgagccttggggtcacctcagggggtggcagggtcttgagcccaagaaaggaaaagacacgatgtggttcctgattggctgagtgtgacccggctctgtgtgtcagagttgggcaggacatggattgagacccaccatagaaagcatgtgatcctggaagcccctaggcttggagagggcaccagggccagcgcccaccacgcctaggtacgatctctcggacttccaggtctgcagcggctcttggcgtctgggccagcatgcttggttggccaggggctggttggtggccctgtcttgtgccctgtgtccccggtatggccctggggttgtgtgtggtagcaggcctgggcagtggaggtgctcttggggcctgcagtagggtgctgcccaggcatcttgcccgagccaggtgacacgcttgccctgtctttccagggtttggcggcagggagggccaagggtgcccagtgtccgtgagggatcagtattcagcatggatcccatcacatgagtatcccttagccccttctctacattgatgtgtgaggccctggttagacacatttcctcctcctgtccctccagatggtaagcctggaggaagacttgtgttgggcccacaggccccaggccaatgtctgtcagccaggtgctcagcctctggtgcgctgaaactctgacccttcctggcacactggtctcctgcactgagctggggtaagcacatctgggttgcactggatgtttgtgtggggagggggttccctaggttgggtcaatgatgagaacctgatattgccctgaagagagatgatgacttaaaaatcatgttcaataggattacgctgaggcctagcctaggtgagaattttggaagcagatgctgggatcccaaggtcccttgcagggccatcgtatgttgaactggagacctggaggctctgaagggcatctggaggtcgtgcaacctgtctctgcactcctctgtgaggcagcccaggctccctgtgtggggttggtgttggtgctatggttccctgggggtggggaacattggtggctccctccagagcccctgttctcaccttgtgcctttcagattttccacctaggaggtccacctggcattgactgacataggtgagtggatcctgctggggtcatgggtcatgagccagaccatggggggatcccagagattcagtctttgggcaacagttttctcagggagcagacctgaatttccacctgggagggaagggttctcctggagggcgacttttttgggaatcggacccaaggaggatgccttccctgaagccctgccggggtgatggtggtccaggcaggaaagttccttctgctcaatgcagggcagcacccagctgagactcggtgctccggtaaggcctccagaactgcccaggtcacataaggggggccagaggggctacgaggtgccacggggtaacaggggagctcttggtccccagagtgtggtgcatgaatgggcccattccgttgggtctcagagatttaaggattgcaccacaccatggccctgaatgcaaccgtccctgttgatcaatgggccatcccatgggtctcctggagcctggtgggaggcagtgttgttttcctggggttgggtcaaggcggagctctggctggtacctggtggtgctgcaggtcagccctgggacttgtgggctttgggccaaggggcatcccgcatcccgctgggggccaccctttctccatggtcgagtgtcgtgaagggtggcctcctgagttgggaaggcttgctattgaggcacttgtactgtgaatttgttgctcaggctgcttgggagccatggtgtcacctccagggtggcagggtcttgggaccaagcaaaggagtgggcaccatgtcactgcagataggccatgtgtgactggctctgtgtctgggagatatgtggagtatgaatggggacccaccattcatagagaaagcaagtggccctgcagcccgaggctatgatttccggtgcacacttggagagggtgcctttacacccaagtaccaggctcagaggtaggctatgccactatcaggtctgcagtggcacgtggcatctgggccagcctccttggttggccatgacctggctggtggcctgggcctgtgcccagtgttcccagggtagttctagggtgctgcgggggagctgttttggctagtggaggtgctcttgggtcctgcagtacagcacagcctgggcgttttgcctgagcccagtgacctgcctgccttgcccttcccaggatcggtggtagggaagaccaggggtgcccggcataggtgatgagtcagtatttcacatggatatcatcacatgtgtccatggagggggagcaaacatgagctggcacccgccacccccttctccacatgaagggtggtcacacgttctccatctgttcctccagatggtgagacttctgtcggcctcgcttttcctgggccagtgtccatcagccaggtgctcagccccagtgcactgaagctccagcccttcctggcgccctggactgagctgtggtgagcacatccgggttccactggatgcgtatgtgggaaggggggtgccctgggttgggtcaatgatgagaaccgtatattgtcctgaagagcggtgatgacttaaaaataatgctcaataggattacgctgaggcccaccctaagtgagaaatttggtaggggatgttgggatcccgagatttctggcagggccactgtagtttgggttggaggcctggaggccctgaagggcatctggaggtggctcaactctttctctgtgctcctccgtgtagcagcccaggctccctgtgcgggcttggtgttgttgcttctgttccttgggggcagggcatgtgggtggctcctccctgagccccagttctccccttgtgtctttcagtgagctcttctgccaagggggtcctcctggcattgaccaacataggtgagtggatcctgctgctgtcatggtccgtgagccaggctgcttggggttgccaagggtcagacttcgggccatgaaggtttcctcagggagctgaccctaattcccatgagggaggcatggtttctccaggaggtcagcttccttgggaatctgtgacttgacagggttgagtcgcagaggttcaaggatctcatcccacctgtaaccctgaatggggcccaccctgttgagcaactggccatcccagtggcacatattgagcctggtggggggtggtgcagtttcaatggggttgggtcaaggctgagatatggctggtgcctggtggtgctgcagtccagccctgggatccgtgggctttgggctgagggggaagcctgcatcctattgggggtaacctgttctccaaatttgagtgattggtgggaaggcctactgtctgaggtcctgtactgggaatttgccacctcagcttcttctgagccatagggtcacctccagggtcatggggtcttgggaccaaggaaaagagaagataccatgtggcccttgattggccgagtgtagcccagctctgtgtttgggaggtgtgtgggatgtggatagggtcccacctgtgaaagcatgtggcccgggtccccaggctgtgattttcagtgcacacttggagagggcaccttggtgggtgcccaccatgtccaggggcaggctatgtgactgccaggtttgcaatggtgtgtagcttccttctaccctccttggttggctgggagtgggttggttgctgtggcccatgcccagtggtcacagggcaggcagactgccttgttttttcagggtatgctgacagggagggccatgggtgccctgcattcatgatgagtcagtgttccacatggaacccattatgtgggtatctcttattccttctacatatggagatgtgaggccctatttggacacatgtcctcctcctgtacccccaggtggtgagcctggaggaagacttgcattgggcccaatggccctggaccagtgtctgtcagccaggttcccagcccccgatgcgctgaagctcaagcctttcctggcaccctggtctcctgcactgagctgtggtgagcatatcctggtcctgctggatgcatgcgtggggaggggttgtcctaggttgggtcaatgatgagaaccttataatgttctgaagagaggtgatgacttaaaaatcatgctcaataggattacgctgaggcccagcctaggtgataattttggaagaggacactgggtcccgaagccccctgcagggcccctgtgttttgggctggagaccttgaggccctgaaaggcatctggtggacccaactctatctctgccctcctcaatgaggcagcccagcctccctgtactggcttggtatccgggctccgggtctctggggacggggcacattggaggctccttcctgagcccccattctctcctgtgtctttcagtgagctcttcggcccaagtggtccccccggccttaagcggcataggtgagtgcatcctgttttgatcatgggccatgagtgttgcagcatggggtccccgacattcagccttcaggccactaggcttttctcaggctgcaaacctactctccaccagggagcgatggtttctcaggagggccacttccttcggaatctgacccatggagcacgcctttcctgaagccctgcagaggtgacagtggtccaggcaggaaggggttccttcagccccaatgtagggcagctcccagctgaaacttggtggacagatcaggcctggagtactgcccagggcatatggggaggagggacacagggaatgtggcgcaccctagaggtcacactggagttctgtctccctggagaggggtgagtgattgggcccacatggtcaggctgtggagattcaaggaatgctccacaccgatggccttgaatgggaccaaccctattgagcaatgggccatcttagtggcacctccttgaacctggtgggggatggcactctttcaatgaggttgggtcaaggctgagctctggctggcacccagtggtgctgcaggctggccctgggacttgtgggctttgggccaagggggaagcttccatcctgctgggaacaacccttccttgaggtccagtggcaggaaggggggcttcctgaggtggaaagccctactgttgagggacctgtcctgggaatttgctgtccaagctgcttctgagccatggggtcacctctagggtggtggggtcttgagcccaaggaaaggagaggacaccatgtggttcctgattggctgagtgtggcccggctctgtgtgtcggagttgtgcagggtatggattgggacccaccagtgaaagcacatggccctggaggtccgcaggcttggagagggcaccagatctggcacccaccatgcccaggtacaggctctgggactgccaggttgcagcagctcttggcatctgggccaccctccttggttggccaggagctagttggtggccctgtcccatgccccatgtccctggtatggccatggggtcatgcagaggaaccggccctggcatggaggtgctcttgcaacatgcagtagggtgcatcccaggcatcttgcctgagccaggtgacccgcttgccctgtctctccagggtttggtggcagggagggccaagggtgccccgtgtccatgttgggtcagtgttcagcatggatcccattgcatgagtatcacttagctccttcccagcattgatatgtgaggccctggttggacacttgtcctcctgtccctccagatggtgagcctggaggaagactcgtgttgggcccacaggccccaggccagtgtacgtcagccaggtgctcagcccatggtgtgctgaagctctgacccttcctgactccgtggtctcctgcactgagctgtgatgaccatatccaggtcctgctagatgcatgcgtggggaggcagggtgccctgggttgggtcaatgatgagaaccttgtattatcttgaagagaggtgatgacttaaaaatcatgctcaataggattacactgaggcccagactaggtgagaattttggaagaggatgctgggatcctgaggtccccaacagggccaccatattttgggctggagacctggaggtcctgaagggcatctgtagggggcccaaccctgtctctgcactcctccctgaggcagcccatgctccctattcgggatcggtattggtgctccacttccctgggggcaggacacgtgggtggctactccctgagcccccgttctccccttgtgtctttcagtgagctcttccaaacaggtgggctccctagcattgaccgacagaggtgagtggatccttctgggattatgggccatgagccaggccatgtggggtccccaaggttcagcctttggatcccgagagttgtctcagacagccaacctgatttgccacctgggagagatggcttctccaggagggtgggtttttgggaattggacccaaggaggacgccttccctgaagccctactgggatgatggtggtccaggcaggaaagggttccttcacccagctgagactcggtgttccagtaaggcctcaaggacctccctgccacatgaaggggcccagaggggctacgaggcaccacaggagtgacaggggagctcttggtccccagagtgtggtacatgaatgggcccatggggttgagtcgcagagattcaaggatgctgcaccacccatggccctgaatgtgactctcctcctggagcctggtggggggtggcgttttttccctggggttcggtcaaggtggaactctggtcagtacctggtggtaatgtaggtcagccctgggactcgtgggctttgggccaacggacagcccacatccctctgggggtcaccctttctctgaggtcgagtgtcgtgaagggtggcctcctgaggtgggaaagcccaatgtcgaaggacctgtactgagaatttgttgcttaggctgcttaggatccatgttgtcacctccagggtggtgggatcttgggaccaagcaaaggagagggcaccatgtggctgccagtggctatgtgtgactggctctgtgtctgagaggtgtgtggatggggacccaccagagaaagcaagtggccctgcagccccaagatgtgatttctggtgcaggcttggagagggtgcctatacctgctcccaccacgcccaggggcaggctttgccactgcaggtctgcagtgccacgtggcatctgggccagccaccttggttggccgtgacctggctggtagcccgtgcctgtgcccagtgttcccagggctgccctggggtcttgctggggagctgttttgggcagtggaaatgctcttggggcctgcagtatggcacagcctgggggcattttgcctgagcccagtgacctgcctgccttgtccttcctgggttcggtggcagggagggccaagggtgccctacattggtgacaagtcaatattttgcatggatctcatcacgtgtccatggaggtgggggcaagcgtgagctggcacgcaccccattctccccatggagggtggtcacatgtactccacctgtgtccctagatggtgagactggaggaagacttccattgggcccacttttcatgggacagtgtccatcagccaggtgctcagcccccagtgcattgaagacccagcccatcctggcaccctagtctcctgcactgagctgtgctgagcacatctggcttccactggaagttttttttgcgaggaggggcttccctgggttgggtcaatgatgagaaccttatattgtcctgaagagaggtgatgacttaaaaatcatgctcaataggattacgctgaggcccaacctaggggagaattttggaagaggattatgggatcccaaggtccccaacaaggccactgcattttgggctagagacctggaggctcttaagagcatctggaggtggcccaacctgtctctgctccttcgtgatgcagcccaggctccctgtgtgggattggtgttggtgctccatttccctggcatggggaatgttggtggctccttcctgagctcctgttctcgccttgtgtctttcagtgagctctgccacccaggacatccccctggcattgactggcataggtgagtggatcctgctggggtcattggtcatgagccagaccatgtggagtccccaaggttcagcctttgggccacaaaggttttctcagggagcagacctgaatttcacccgggagggaagggttgtcctggagggtggcttttttgggaacctaacccaaggaggacccattccctgaagccctgcaggggtgatggtggtccaggcaggaaagggttccttctgctcaatgcagggcaacacccagctaagatgcggtgatctggtaaggcctccagaactgcccaggccatatgaggggggccagaggggctacagggtgccacaggggtaacaggggagctcttggtccttggagtgtggtgcctgaatggacccatgggattgggttgtgtagattcaaggatcacaccctacccacagccctgaatgtgactcttcctcttgagcaatgggccatctcagtgggtctcctggagcctggtcggggggtggtgttgtttccctggggttgggtctaggtggagctctggctggtacctggtggtgctgcagatcatccctgggacttttgggctttgggccaagggacagcccgcatcccgcttggggtcagcctatctccatggtcaagtgtcatgaagggtggccccctgaggtgagaaggcctactgtcaagggatctgtcccaggattttgttgctcaggctgcttctgagccatggcgtcacatccacagtggcagggtcttgggcctgagcatagcagagggcaccatgtcgttctggattggccaagtatggcctagctctgtgtgcgggaggtgtgcagagcatggacggtgacccaccagagaaagcacgtggccctgcatcccaggctgtgatttccaatgcacacttggagagggtgtcttgatttgtgcccaccatgcccaggggcagactacgtgatagccaggtctgcagcctgagccacgtgtggcatctgggccagccaccttggttggccgtgagctggctggtggccttggcctgtggccagtggtgccagggcggccctggggtcgtgtgggggagccatgttgggcagtggaggtgctgtcagggcctgcagtacagtgcagcctgggcatttggcctgagcccagtcacccgcctgctctgttcctccagggtttggtggcggggagggccaagggtgccccgcatccgtgacgactcagtaattcacatggatcacatcacatttttccttggagggcaagcaaatgtgagcccccaccccccactgccttccccacatggaggtcattttggacacatatcctcctctagtccccctagatggtgagactggaggaagacttgcattatgcccgctgttcctgggccagtgtcagtcagccaggttcccagctccaagtgtgctgaagctcaggcccttcctggcaccctcagctcctgcactgagctggggttacatccgggttccactgtttgcatgcaaagggaggggtgtaccctgggttgggctgatgatgagaaccttatattgtcctgaaaaaaggtgatgacttaaacatcatgcttaatagtattatgctgaagcccaagctaggtgagaattttggaagatgaggctgggatcctgagatccccggcagggccacacttattttgggctggaaaatttcaagacctgaagcgcatcttgtgggggggcaatcctgtctctgtgcttctccgtgaggcagcccaggctcccgttgcgggcttggtgcccatgcttcgcttccccaggggtggggcaatttggcatcctcttcctgagccctccttcttccctgtgtctttcagtaagttcttcttcccaggtggggcccctggctttgagcggcatgggtcagagcatcctgtcagggtcatgggccatgagtgaggcagcgtcggttcgtcgagagtcagcctttgggccactggggttttctcagggagccaacaggttacccatcaggagggatggttcctccaggagggtcgcttccttgggaatctgactctaggagcatgcatttcctgaagctctgcagggtgatggtggtccaggcgggaaagggttccttcagcccaacataatgcagttcccagctgaaactcggtggcagatcaggctcaaggactgctcgggccacatgatgggggccacaggggatttggggtgccctgggggtcatgctggagttcttgccccaagaggggtgggtgatagggcccatgcgatcaggctgcggagattcaaggaatgctacccacccatggccctgaatgggactgaccctgttgaacaatgggccattttaatggtgcctccttgagcctggtaggtagtggcattgtttcaatgcggttgggtcaaggctgaactctggctggtgcccggtggtgcccacatgggctttgggccaagggggcagctcatatccctctggggtcaccccttccttgagattcagtggcaggaagggtgttctcctgaggtggaagacctgctgtcaagggacttgtcctgggaatttgccacctaggctgcttctgagccatggagtcacctccagggtggcagggtcttgagcccagggaaaggagacaccatatggtttctgactgggagtgtggcctggatctgtgtgtgggaggtgtgcagggcatggatggggacccatcagagaaagcatgtggccctgtaggcccccaggctttgatttctggtgtgtgcttgcagtgggcaccagggcagccctaccatgcccaggggcaggctctgtgactgccaggtctggagtggctcctggcatgaagaccacgctccttggttggccatgagcaggttggttgccctagcctgtgccctgtggtcctggtgcagccctggggttgtttggggagacagcaccggcagtggaggtgctctcaaggcctgcagtagggcgcagcccaggtgtcttgcccgagcccagtaacccacttgccctgtctttccagggtttggtggcagggagggccaactgtgccccgcatctgaaatggatcagtgttctgcatggatcccatcacaagggtatcccctacccaacttctgtgcattgttatgtgaggccctggttggacacatgtcctcctcctgtccctgcagatgctgaccctggaggaagacttgtgtcgggcccccaggccccaggccagtgtccatcagccaggtgctcagctcccagtgcgctgaagctcagacccttcctggcaccctggtgtccagcactgagctgtggtgagcccatccgggtcctgctggatgcatgaatggggaggggcctgcccagagttgggtcaatgatgagaaccttacattgtcctgaagagagatgatgacttaaaaatcatgctcaataggattacgctgaggcccagcctaggtgagaattttggaagaggacggctgggatcctgagatcccagtcagggtcactgtattttgggctggagacctggaggccctaaagggcatctggaagggggcccagccctgtctctgtgctcctccgtgaggcaacccacactccctgtgtgggcttggtgttggtgctctggttccccagggacagggcgggttggtggctccttcctgagcccctattctccctttgtgtctttcagtgagcttttccacccaggtgggccccctggcattgaccgacataggtgagtgcatcctactgggataatgggccactagatagtctgtgtggggttgctgaggtttagcctttgggccacaagggttttctcaggcagccaacctgaattcccacctgggagagatgggttctccaggaggcagcttttttgggaatcagacccaaggaggacaccttccctgaagccctgcaggggtgatggtggtccaggcaggaaagggttccttctgcccaactcgaggcccaatgcagggcagtgcccccctgagaattggtgctctggtaagggctcgaggactgcccaggccacatgaaggaggtcagaggggctatggggaaccatgggggcaacaggggagctcttggcccccggagtgtggtacatgaatgggcccatggggttgggtcacggagattcaaggattgcatctcacccacggccctgaatgcgaccatccctgttgagcaatgggccatcccagtgggtctcctggggcctggtgtggggtggcattgttttcctggggttgggtcaaggcggagctctgactggtacctgatggtgctgcaggtcagccctgggactcgtgggctttgggccaagaggcagcccgcatcctgctgggggtcgccttttctccgaggttgagtgtcgtgaaggatggcctcctgaggtgggaaggcccactgtcaaggcacctagactaggaattgttcctcaggctgcttgggagccatggtgtcacctccagggtggcgggatcttgggactaagcaaaggaggggacactacgtggctcccaattggccatgtgtggctggctctgtgcctgggaagtgtgtggagtatggatggggacccaccagagaaagcaagtggccctgcagtcccagaatgtaatttctggtgtaggcttggagagggtgcctatatgcatgcccaccatgcccaggagcaggctatgccacttcagggtctgcaggggcacctggcatatgggccagcctccttcgttggctgtgacctgggtggtggcctgtgcttgtgcccagtggtcccagggtagccctggggtcgtgcaggggagccgttttgggcagtggatgtgctctcgggtcctacagtacagcacagcctgggtgttttgctcaagcccagtgacctgcctgccttgtccttcccgggttcagtggcagggagagccaagggtgccccacattggtgacgagtcagtattttgcatggatctcatcacacgtgaccatgaaggacgagcaagcatgagctggcaccagccacccccttctccgcgtggagggtggtcacatgtcctccacctgtgcccccagatgatgagactggaggaagacttccattgggcccacttttcctgggccagtgtccatcagccaggtgctcagcccctggtgtactgaagctccagcctttcctggtgccccagtcttctgcactaagctgtggtgagcacatccgggttccactggatttttgtgcggggagggggttttctacgttgggtcaatgatgagaatcttatattgtcctgaagagaggtgatgacttaaaaatcatgctcaataggattacgctgaggcccagcctaggtgagaattttggaaggggattatgggatgctgaggtcctcagcaaggccactgtattttgggctagagacctggaggctctgaagggcatctggaggtggcccaacctgtctctgcgctcctccatgaggcagcccaggctccctgtgcagggttggtgttggtgctccggttctctggtgtggggaatgttggtggctccttcctgagccctcattctcaccttgtgtctttcagtgagctcttccacccaggagggccccttggcattgactggcataggtgagtggatcctgctggggtcattggtcatgagctagaccgtgtggggtccccgaggttcagccttcagtccacaagggttttctcggggagcagacctgaatttccacctgggagggaagggttctcctggagggtagtttttttgggaatctagcccaaggaggatgccttccctgaagccctgcaagggtgatggtggtccaggcaggagagggttccttctgcccaatgcaggacagctcccagttgagactgagtgctccagtaaggtctccaggactgcccaggccacatgaaggaggccagaggggctatggagcaccactggggtaataggggagctcttggtccctggagtgtggtgtgtgaatggggtttggtcacggagattcaaggatcacaccccacccatggccctgaaagtgaccatccctattgagcaatgggccatcccaccgggtctcctggagtctggtgcagggcgacgttttttccctggggttgggtcaaggtggagctctggtacctggtcatgctgcaggtcagccttgggactcgtaagctttgggccaagggacagctggcatcctgctggggggtcaccctatctctggggtcgaatgtcacgaagggtggcctcctgaggtgggaaggcccattgtcgagggacctgtcccaggattttgttgctcaggcttcttctgagccatggtatcacctccagggtgacagggtcttgggcccaagcaaaggagagggcaccatgtcgctctgagttggccaagtgtagcctagctctgtggtgggaggtgtgcagagcatggctggtgacccaccagagaaagcacgtggccctgcagccccaagctgtgatttccagtacatgcttagagagggcatcttgatgtgagcccaccacacccaggggcagactacgtgactgccaggactgcagtggcacatggcatctgggccagccttcttggttggccatgacctagctaatggccctggcccgtgccttggggtcatgcaggggagccctcttggacagtggaggtcctctcagggcctgcaatatggcgcaggctgggcatttggcccgagcccagtgacctacctgccctgtccttccagggttgggtggcagggagggacaagggtgccccatgtcagtgacaagtcagtatttcacatggatctcatcacatgtgcccatggaggacgagcaagcgggaactggcacccgctacttccttccctacatagaggccattttggacacatgttctccacctctctcccagatggtgagacgggaggaagacttgtgttgggcctgctgttcctgggccagtggccatcagcctgttgcccagcccctgaggcgctgaagctcaggcccttcctcacaccctggtctcctgcactagctgtggtgagcacatccgggtcccgctggatgcatgcaagaggtggttggtctcgtgggttgggtcgatgatgagaaccttatattttcctgaagagaggtgatgacttaaaaatcatgctcaataggattacgctgaggcccagcctaggtgagaactttggaagaggatgctgggatcctgagatcccaggcagggccactatattttggggtggagaactcaaggccctgaagggcctctcagggggtgccaccctgtctctgtgcccctctgtaaggcagcccaggctccctgtgtgggcttggtgtctggtctctggttccccgggggcggggcatgttggtggctccttcctgagcccgctttctcccccatgtctttcagtgagctcttctgcccaggtggggcccatggccttacacgacataggtgagtgtatcctgttggggtcatgggccatgaatgaggcagcatggggccatttagggtcagccttcgggccactagagttttctcagggtgcgaccggggagggaacatttctccagtagggtcacttccttggaaatctgatcctaggagcacgcatttcttgaagtcctgcaaaggtgatggtggtccagacaggagagggttccttcagcccaacatagcgcagctcccagctgaaactcggaaggctggtcaggcctcgaggactgcccaggccacatgaggtgggcaacaggggctctggggcaacctgggggtcacgctggagttctccctctctggacagtggtgggtgattgggcccacgcagacaggccccggagattcaggactgcaccccatccatggccctgaatgggaccgaccctgttgagtaatgggccatctcagtggtacctccttgagcctggtagggggagacactgtttcaatgcagttgaatcaaggctgagctctggctggtgcctggtggtgctgcaggcagccctgagggttgtggtctttgggacaaggggtagctcacatcccactggggtcaccccttccttgagattcagtggccaaaagggtgtcctcctgagatgggaagtcctgctgtcgagggacctgttctgggaatttgccacacaggctgcttctgagccacggggtcacctccagggtggtagggtcttgatcccaaggaaaggagaggacaccatgtggtttcttattgaccaagtgtggcctggctttgtgtgtgggaggtgtaacgcaagatgaggacccaccagagaaagcacgtggctctggaggcccccagggtttgatttccggtgtgtgcttggagagggcaccaggttgggcacccaccacgcccagggcaggctctgcgactgccaggtctgcattggctcctggtgtcagggccagactcattggttggccatgagcaggttggttgccctgacccatccccatggtcccagtgtggccctggggtttttcaggggagccggctcaagcagtggaggtgcgcttagggcctgcagtagggaacagcccaggcatcttgcctgagcccagtaacctgcttgccttgtctttccagggtttggtggccgggagggccaatgatgctctgcgtctgtgttggatcagtgttcttcatggattccatcacgtgggtatcccctacccaccttccccttgctcatacgtgaggccctggttggacacatgtccttctcctgtcaccccagatggtgagccttgaggaagacttgtattgggcccccacaggccccaggccagtgtccgtcagcctggtgctcacccccagtgtgctgaagctcagaccctccgtggcaccctggtctcctgcactgagctgtggtgagcacattcaggttccgctggatgcatgcatggagaggggcttgcccttggttgggtcagtgatgagaaccttctattgtcctgaagagaggtgatgacttaaaaatcatgctcaataggattacgctgaggcccaacctaggtgagtatgttggaagaagacactgggatcccgagatctccaacagggcactgtattttgggttggagacctggaggccctgaagggcatctggaaggaggcccaaccctgtctctgtgctcttccttggggcagcccaggctacctctgcgggcttggtgttggtgctccagttccctggggccagggaacattgctggctccttcctgagcccccattcctcccttgtgtctttcagtgaacttttcctcccagatgggccccctggcattgactggcataggtgagtgcatcctgctggggtcatgggccatcagccaggccatgtggggtcgctgaggttcagcctttgggccacaagggttttctcaggcagccgacctgaattcccacctgggagagacgggttctccaggagggcagcttttttgggaattagacccaaggaggatacctgaagccctgcaggggtgacggtggtccaggcaggaaagggttccatcagcccgggcaaggcagctcctagctgacactcggtgttcgggtcagtccttgaggactgcctgaacacgagggggtccagaggggctctgggtgccacgggggtcacatgggagctctcagtccctagagtgtggtgtgtgaatggacccttagggttaggtcttggagataaaaggattgtgctccacccatggcctggaatgtgaccgtccctgttgagtaatgggccattccagtgggtctcctggagcctgatgggaggtggcgttgtcttcctggggttgagtcaaggcagagctctggcccatacctggttgtgctgcaggtcagccctgggactcgtgggctttgggccgaggggcagcccgcatcccgctggagattaccctatctctgagatcaagcgtcatagagggtgacctcctgagaagggaaggcccactgtcgagggacctttcctaggattttgttgctcaggctgcttggaatccattgtgtcacctccagggtgatggaggtttgggcccaagcaatggagagggcaccatgtgtctcctgattgttcaagtgtgtcggagatatgcggggtatggatggtggcccaccaaagaaagcatgtgactcaagctgtgatttccagtgcatgcttagagagggcgcctgtatgcgtgccccacatgcccggggtaggctatgcaactgccaggtctgcagtggcgcatggcatcttggccagccttcttggttggccatgacctggctaatgaccctggcctgtgcccagtgatcccagggaagccctggtgtcatgcagcggaggcctcttgggcagtggaggtgctcttaaagcctgcagcatggcacggcctgggcatttatcccaagcccaatgaactacctgccctgtccttccagggttcggtggcaggcagggccaagggtgccccgtgttggtgacaagtcagtatttcacatggctctcatcacatgtgtccgtggaagataagcaagtgtgaactggcacgtcctacctccttccctacatggaggtaactttggacacatgttctccacctctctcccagatggtgagaccggaggaagacttgcattgggcctgttgttcctgggccagtggccatcagcctgttgcccagcccctgatgcgctgaagctcgggcccttcctcgcgccctggtctcctgcactgagctgtggtgagcacatccgggtcctgctggatgcatgcacgaggtgattgatcccctcagttgggtcgatgatgagaaccttatattgttctgaagagaggtgatgacttaaaaatcatgctcaataggattacgctgaggcccagcctaggtgagaattttggaagaggatgctgggatcccgagatccctggcagggccactatattttgggctggagaacttgaggccctgaagggcatctcaggggggtccaaccctatctctgtgcccctccatgaggcagcccaggctccctgtgtgggcatggtgtccgggctctggttccctgggggtggggcatgttggtggctccttcctgagcctgctttctcccccatgtctttcagtgagctcttctgcccaggtgaggcccatggccttaagcggcataggtgagtgtatcctgttggggtcatgggccatgaatgaggcagcatggggccatttatggtcagccttcgggccactagggttttctcagggtgcgaccggggagggaatgtttctccagtagggtcacttccttgggaatctgaccctaggagcatgcatttcgtgaagccctgcaaaggtgatggtggtcccggcaggaaagggttccttcagcccaacatagagcagctcccagctgaaactcagcgggctggtcaggcctcgaggactgcccaggccacatgaggtgggcaacaggggctctggggcaacctgggggtcacgctggagttctccctctctggacagtggtgggtgattgggcccacgcagacaggccccggagattcaggactgcaccccatccatggccctgaatgggaccgaccctgttgagtaatgggccatctcagtggtacctccttgagcctggtagggggaggcactgtttcaatgcagttgaatcaaggctgagctctggctggtgcctggtggtgctgcaggcagccctgggggttgtggtctttgggacaaggggccagctcacgtccctctggggtctccccttccttgagattcagtggccgaaaggatgtcctcctgaggtgggaagtcctgctgtcgagggacctgttctgggaatttgccacacaggctgcttctgagccacggggtcacctccagggtggtagggtcttgatcccaaggaaaggagaggacaccatgtggtttcttattgaccaagtgggacctggctctgtgtgtgggaggtgtagggcaagatgaggacccaccagagaaagtacgtggccctggaggcccccaggctttgatttctggtgtgtgcttggagagggcaccagggtgggcacccaccatgcccagggtaggctctgcaatggccaggtctgcattggctcctggtgttagggccagactcgctggttggccatgagcaggttggttgccctcacccgtccccatagtcccagtgcggccctggggttgttcgggggagccggcccgagcagtggaggtgctgttggggcctgcagtagggcatcttgccccagcccagtgacccaccttccctgtctttccaaggtttggtggccagcagggccaatggtgccctgtgtctgtgatgagtcagtgttcttcatggattccatcacatgggtatcccctacccacattcccctcgctcatatgtgaggccctggttggacacatgtccttctcctgtcaccaccccagatggtgagcctggaggaagacttgtattgggaccctacaggccccaggccagtgtctgtcagcctggtgctcatcccccagtgcgctgaagctcagaccctccctggcaccctggtctcctgcactgagctgtggtgagcacatccaggttctgctggatgcatgcatggggagggccttgattgggtcaatgatgagaaccttatattgtcctgaagagaggtgatgacttaaaaatcatgctcaataggattacgctgaggcccaggctaggtgagaattttggaagggagcgctgggatgccaagatccccggcagggccactagccactgtattttatactgaagaacttgaggccccaaagggcatctcaggggtcctagccctgtctctgtgcccctccgtgaggcagcccaggctccctgtgttgacttggtgtccaggctctgcttcctggggatagggcatgttggcagctccttcctgagcccacgttctcccctgtgtcttctattgagctcttctgcccaggtggggcccatgcccttaagcagtataggtgagtgtatcctgttgcggtcatgggccataaatgaggcagtgtggggtcatcgagggtcagccttcaggccactagcgttttctccaggtgcccccggggagggaacattgctccagtagggtcacttccttgggaatctgaccctaggagcacgcatttcctgaagccctgcaaaggtgatggtggtccaggcaggaaagcgttccttcagcccaacatacagcagctcccagctgaaatttggtgggctcgtcaggccttgaggactgcccaggcttcatgatgggggacacagaagctctggggctccctggggctcacactggagttctccctccctgaagagtggtgggtgattgggcccacagtcaggtggcggagattcaaggaatgcccccacccctggccctgaatgggaccaactctgttgagtaatgggccatcttaatggcgcctccttgagcctgttgggggtgggttgctgtttcaataaggttgagtcaaagctgagctctgactgggcgcctggtggtactgcaggccggcccttccttgggccaagggggcagcttgtgtcccgctggtgtcatcccttccttgaggtccagtggtggaaagggtagcctcctatggtgggaaggcctgctgctcagggacctgtcctggaaatttgccatccaggctgcttctgagccatggggtcacctccagggtagtggggtcttgagtccaagaaaaggagaggacaccatgtggttcctgattggccaaggctccttggttggccaggagcaggttggttgccctggcccatgccccatggtcctggtgtggccctggggttgttcaggggagctggcccaggccgtgaaggtgctctcagggcctgcagtagagtgcagcccaggcatcttgccccagcccagtgacccacttaccctgtctttctaaggtttggtggccaggagggccaatggtgccttgtgcccatgttgggtcagtgttctgcatggatccccatcatatgggtattccctacccaccctccctgcactgatatgtgaggccctggttggacacatgtcctcctcctgtcccttcagatggtgagtctggaggaagacttgtgttggacccccacaggccccaggccagtgtccatcagcctggtgctaatcccccagtgctctggagtttggaccctccctggcaccctggtctcctgcactgagctgtggtgagcacatggatgcatgcttggggtgggggttgcccttggttgggtcaatgatgagaaccttatattgtcctgaagagcggtgatgacttaaaaatcatgctcaataggattacgctgaggcccagcctaggtgagaattttggaagaggacactgggctccccggaatggccactgtattttgcgctggacacctgcaggccctgagggccatctggaaggtccaaccctgtctctctgctcctccaggaggcagcccaggctccctgagggggcttggtgtcgggctcctgttccccggggttggggccggttggtggctccttcctgagcccccattctccccttgtgtctttcagtgagctcttccacccgggcgggcccccggcattgactggcataggtgagtggatcctgcttgtgtcatgggccatgaaccggtccatgtggggtcaccaagggtcagcctttgggataagagggtttcctcagggaaccaacctgaattcccatcagagaggtatgggttctccaggagggccgcttttttgggaattggacccaaggaggataacttccctgatctctgcaggagtgacggtggtccaggcaggaaagagttccttcagccccacccagcgcagcgttctgttgagactcagtgctcaggtcaggcctggaggatttctcaggccatctgagggggttagaggggagctctttgtccatggagtgtggtgcttgaatctgcccttggggttgggtcatggagattcaaggatggtgcctcacccatggccctgattggaattgtccattgagaaatacgccattccagtgggcctcctggagcctgatggggggtggtgtttttttccctggggttgagtcgttgatggggactcaccatagaaagcatgtggctctggaggcccccaggctttgatttccagtgcctgcttggagtgggcaccagggccggcacccaccatgcccaagggcaggctctgcgactgccaggtctgcattggctcctggcatcaggaccagcctccttggttggccatcagctgcttggttgccctggcccatgccccgtggtcctggtgtggccctggggtggttgagtggagctggcccaggcagtggaggtgctcttggggcctgcagtagggtgcagcccaggcatcttgcctgatcccagtgacctgcttgccctgtctttccaggattttgtggcagggagggccaagggtgccctgcatccgtgatgggtcagtgttccacgtggatcccattacgtgggtccatagaggatgagcatgcgtgagccagcgcccccttcccacttcttctcatggagctgtgaggccctgtgtggacagctgtcttcctcttgtcccaccaggtggtgagcccggaggaggacttgcgttcggcccgctggtcccagtgtgtccggaattggtgggttcttggtctcactgacttcaagaatgaagctgcggaccctcgctgtgagtgttacagctcttaaggtggcatgtctggagtttgttccttctgatgttcggatgtgttcggagtttcttccttctggtgggtttgtggtctcgctggcttcaggagtgaagctgcagaccttcgcggtgagtgttacagctcataaaagcagtgtggacccaaagagtgagcagtagcaagatttattgcaaagagtgaaagaacaaagcttccacagtttggaaggggacccaagtgggttgccactgctggctggggcagcctgcttttattctcttatctggccccacacacatcctgctgattggtagagctgagtgatctgttttgacagggcgctgattggtgcgtttacaatccctgagctagacacaaaggttctccatgtccccactagattagctagatacagagtgttgacacaaaggttctccaagtccccaccggagtagctagatacagagtgtctattggtgcattcacaaaccctgagcttgacacagagtgctgattggtgtgtttgcaaaccttgagccagatacagagcgcggattggtgtatttacagtccctgagctagacataaaggttctccaaggccccaccagagaagctagatacagagtgtcgattggtgcattcacaaaccctgagctagacacagggtgctgattggtgtgtttacaaaccttgagctagatacagagtgccgattggtgtatttacaatccctgagctagacataaaggttctccaaggccccaccagactcaggagcccagctgtcttcacccagtggatcccgcactggggctgcaggtggagctgcctgccagtcctgcgccatgcgcccgcactcctcagcccttgtgtggttgatgggactgggcaccgtggagcagggggcggcactcgtcggggaggctctggctgcacaggagcccatggagggggtgggaggctcaggcatggcaggctgcaggtcccgagccctgccccgagggaaggcagctaaggcccggtgagaaatcaagtgcagcgccggtgggctggcactgctgggggacccagtataccctctgcagctgctggcccgggtgctaagcccctcattgcctggggccggcagggccggcccgctgctccgagtgtggggcccgccaagcccacacccacccggaactccagctggcccacaagcgccccgcgcagccccggttcccacttgcgcctctccctccacacctccctgcaagctgagggagcaggctccggccttggccagcccagaaaggggctcccacagtgcagcagtgggctgaagggctcctcaagtgccaccaaagtgggagcccaggcagaggaggcgccaagagcaagtgagggctgtgaggactgccagcacgctgtcacctttcatcaggacagtgtctgtcagccaggtgcacagcccttggtgtgctggagcttgggcttttcttggcagcctggtgtcctgcattgagcggtggtgagcttgtccaggtcccgctggttacctgcacggtgacgggggtgccctcggttaggttgatgatgagaaccttattttgtctcgaggagaggttatgtgatgggtgttgtggcagctctttgtatttcattttcttcagtgctttttgtgtgttctctttgtattttttaccgctttgtgtattttactttcacaaaggcagcagcaaatgttttattggtggtggtatttttcatttttatttacttcctaatttgatagtgttttagttggaatacacagtctcattgtagttgttcagaaatatgctttttttctgtacattatatgattgtgcataatttttgccagttttttttttaattggggactacagttgaatgcactgcctatctcctactttactgaaacagattgtatggaaatctaaagacgagaaagtagacaagcacagcagaggacatttattttgatataaccacagaaattcattgatatgaccttatcatattgatggtttttcaaagaaatataaaatctttcgataatggattgtctcagttgcgtttctccttatatcatgttttgccttcaatacaaattgcaatgcttagaaatttaaagaacaccttctgaagtggaagatctagctaaagaattagattggtattggctgaaatgttgcagtaatcacatgatagggttaatacaacatgagttacatgctgagtgctctaaggtagaaagtaggtaacaaggaataacaggtaggtaatgtaagtcgggagaaggaaactctaggacagaatcattagaaaaggcttgacgtcaacagcagtgtatagaatttacagtgtatagaatttacagtgcatagaatttacaataagtgcctttttttgtgctcatcaatgctcttgcttatattgtaggaggagttagttcccttgaagaaatatcaatacaaatttccaaattgcaatgcagagggaaaaaagaatgagaaagtaaaaaatatccaagaactctggaagcatttcaaaaagtgtaaaaatgcatagtgacaatgtcaggagaataaggagataaaggaaaagaaatatttgacacaacaatgacttgagcactttctaaaattaatgatggacagaaacccacatgttcaggaagctcagagagcactctgcagaataaaaatattttacaaatcgacacctttgcatttcatatttaaagtccagaaaatcatagactaagggaaaagcttgataggagcaataggaagaaaaccatcttacctatggagcaacaagaataaaaattgctttgaaattatcttcagaatccatgaaagcaagaagtgagtcagggtgaaatatttagtgttaaaagtaagaaacaaaaaaaagtaccaactttgaattttctgctcatcaaaattattcttcaaaagtgaaggagaaatactctctgagaccaacaaaaattgctagaacttcttgccactacaccaaccttttaataaacgtaacaagaaattcttcagaaaggataaaaatgacataggtcggaaaatctaatttacataaagaaatgaaaagcattggagaagaaatatatgaagaaaaattaaatatatatgtattttttgattcataattgatctttcaacaatttgttcaaaataataacaagattatatttggtgattataggttatggaaaagtgaaatgaatgacagcaatattataagtcatccggttccaagatggccgaataggaacagctccagtttacagctcccagtgtgagtgacgcagaagacagttgatttctgcatttccaactgacgtaccaggttcatctcactggggcttgttggacagtgggtgcagcccatggagtgtaagccgaagcaggacgaggcatcacctcacctgggaagtgcaagaggtcagggaattccctttcctagccaagggaagcgtgacagatggtacctggaaaattgggacactcccaccctaatactgtgcttttccaactgtcttagcaaacggcacaccaggagattatatcccgtgcctggcttggagggtcccacatccacggagccttgctcactgctagcacagtagtctgagatcaaactgcaaggcagcagtgaggctgggggaggggcatccaccattgctgaggcttgagtaggtaaacaaagcggctgggaagctcgaactgggtggagcccaccacagctcaaggaggcctgcctgcttccgtagactccacctctaggggcagggcatagcagaacaaaaggcaacagaaacttctgcagacttaaacatccctgacagctttgaagagagtagtggttctcccagtacagagtttcagatctgagaacagacaggctgcctccttaaatgggtccctgacccccaagtagcctaactgagagacacctcccagtaggggctgactgatacctcatacagctgggtgcccctctgagacgaagcttccagaggaaggatcaggcagcaacatttgccgttctgcaatatttgctgttttgcagcctccactggtgatacccaagcaaacagggtctggagtggacttccagcaaactccaacagacctgcagctgaggatcctgactgttagaaggaaaactaacaaagagaaaggacatccacaccaaaaccccatctgtacgtcaccatcatcaaagaccaaaggtagatgaaaccacaaagatggggagaaaccagagcagaaaaactgaaaattctaaaaatcagagcacctcttctcctccaaaggaatgcagctccctgccagcaatggaacaaagctggacggagaatgactttgacgagctgacagaagtaggcttcagatgatcgctaataacaaacttctctgagctaaaggatgaggttcaaacccatcgcaaagaagctaaaaaccttgaaaaaagattagatgagtggctaactagaataaacagcatagagaagaccttaaatgacctgatggagctgaaaccatggcacaagaactacgtcacacatgcacaagcttcagtagccgatttgatcaagtggaagaaagggtatcagtgattcaagatcaaatgaatgaaatgaagcaagaagagaagtttagagaaaaaagagtaaaaagaaacaaagcctaaaaaagtaaaaaagtaaaacaaagtaaaaaagaaacatgggactatgtgaaaacaccaaatctacgtctgattggtgtacttgaaagtgatggggagaatggaaccaagttggaaaacactctgcaggatattatccaggagaactcccccaacctaggaaggcaagccaacattcaagttcagaaaatacagagaatgccacaaagatactccttgagaagcgtaactccaagacacataattgacagatacaccaaagttgaaatgaaggaaaaaatattaagggaagccagagagaaaggtcaagttacccacaaagggaagcccatcaaactaacagcaaatctctcagcagaaactctacaagccagaagagagtgggggccaatattcaacattcttaaatgaaagaattttcaacccagaatttcatatccagccaaactaagcttcataattgaaggagaaataaaatactttacagacaagtaaatgctgagagattttgtcaccaccaggcctgccctacaagagctcctgaaggaagcactaagcatggaaaggaacaaccagtaccagccactgcaaaaacatgccaaattgtaaagatcactgatgctaggaagaaactgcgtcaactaacgagcaaaataaccagctaacatcacaatgacaggatcacattcacacataacaatattaaccttaaatgtaaatgggctaaattctccaattaaaagacacagactggcaaattggataaagagtcaagacccatcagtgtgctgtattcaggagacccatctcatgtgcagagacacacataggctccaaataaagggatggaggaagatctaccaagcaaatggaaaacaaaaaaaagcaggggttgcaatcctagtctctgatgaaacagactttaaaccaacaaagatcaaaagagacaaagaaggccattatgtaatagtaaaggggtcaattcaacaacaagagctaactatcctaaatatacatgcacccaatacaggagcacccagattcataaagtaagtccttacagacctacaaagagacttagactcccacacaataataatgggagactttaacaccccactgtcaacattagacagatcaacaagacagaaagttaacaaggatatccaggaattgaactcagctctacaccaagcagacctaatagacatctacagaactctccaccccaaatcaacagaatgtacattcttctcagcaccacatcgcacttattccaaaattgaccacatagttggaagtaaagcactcctcagcgaatgtaaaagaatagaaattataacaaactgtctctcagaccacagtgcaatcaaactagaactcaggattaagaaactcactcaaaaccactcaactacatggaaactgaaaaatctgctcctgaatgactactgggtacataatgaaatgaaggcagaaataaagatgttctttgaaaccaatgagaacaaagacacaacataccagaatctctgggacatatttaaagcagtgtgtagagagaaatttatagcactaaatgcccacaagagaaagcaggaaagatctaaaattgacaccctaacatcacaattaaaagaactagggaagcaagagccaacattttcaaaagctagcagaaggcaggaaataactaagattggagcagaactgaaggagatagagacacaaaaaacccttcaaaaaatcaatgaatccaggaactggttttttgaaaagataaacaaaattgatagaccactagcaagactaataaagaagaaaagagagaagaatccaatagatgcaataaaaaatgataaaggggatatcaccaccaatcccacagaaatacaaactaccatcagagaatactataaacatctctatgcaaataaactagaaaatctagaagaaatggataaattcctggacacatacaccctcccaagactaaaccaggaagaaggtgaatctctgaatagaccaataacaggctctgaaattgaggcaataattaatagcctaccaaccaaagaaagtccaggaccagagggattcacagctgaattctgccagaggtacaaagaggagctggtaccatgccttccgaaactattccagtcagtagaaaaatagggaatcctctctaactcattttataaggccagcatcatcctgataccaaagcctggcagagacacaacaaaaaagagaattttagaccaatatccctgatgaacatcgatgcaaaaatcttcaataaaatactggcaaaccgaatccagcaacacatcaaaagctaatccaccacgatcaagttggcttcatccctgggatgcaaggctggttcaacatacacaaatcaataaacataatccatcatataaacagaaccaaagacaaaaaccacatgattatctcaacagatgcagaaaaggcctcgacaaaattcaacagcgcttcatgctaaaaactctcactaaactaggtgttgatgggacgtatctcaaaataataagagctgtttatgacaaacccacagccaatgtcatactgaatgggcaaaaactggaagcattccctttgaaaactggcacaagacaggaatgccctctctcaccgctcctattcaacttagtgttggaagttctggccagggcaatcaggcaggagaaagaaataaagggtattcaattaggaaaagaggaagtcaaattgtccctgtttgcagatgacatgattgtatatttagaaaaccccatcgtctcagcccaaaatctccttaagctgataagcaacttcagcaaagtctcagaatacaaaatcaatgtgcaaaaatcacaagcattcctatacaccaataacagacaaacagagagtgaaatcatgagtgaactcccattcacaattgcttcaaagaataaaatacctaggaatccaacttacaagggatgtgaaggacctcttcaaggagaactacaaaccactgctcaacgaaataaaagaggacacaaacaaatggaagaacattccatgctcatggataggaagaatcagtatcgtgaaaatggccatactgcccaaggtaatttatagattcaatgccatccccatcaagctaccaatgactttcttcacagaattggaaaaaactactttaaagttcatatggaaccgaaaaagagcctgcattgccaagtcaatcctaagccaaaaggacaaagctggaggcatcacactacctgacttcaaactatactacgaggctacagtaaccaaaacagcatggtactggtaccaaaacagagatatagaccagtggaacagaacagacccctcagaaataataccacatgtctacaaccatctgatctttgacaaacctgacaaaaataagaaatggggaaaggattccctatttaataaatggtgctgagaaaactggctagccatatgtaaaaagctgaaactggatcccttccttacaccttatacaaaaattaattcaagatggattaaagacctaaatgttagacctaaaaccataaaaaccctagaagaaaacctaggcaataccattcaggacataggcatgggcaaggacttcatgactaaaacaccaaaagcaatggcaacaaaagccaaaataaacaaatgggatctaattaaactaaagagtttctacacagcaaaagaaactaccatcagagtgaacaggcaacctacagaatgggagaaaatttttacaatctactcatctgacaaagggctgatatccagaatctagaaagaagttaaacaaatttacaagaaaaaaatcaaccccatcaacaagtgggcaaaggatatgaacagacacttctcaaaagaagacatttatgcagccaaagacacatgaaaaaatgctcatcatcactggccatcagagaaatgcgaatcaaagccacaatgagatcccatctcacaccagttagaatggcaatcattaaaaagtcaggaaacaacaggtgctggacaggatgtggagaaataggaatacttttacactgttggtgggatggtaaactagttccaccattgtagaagacagtgtggcaattcctcaaggatctagaactagaaataccatttgtcccagccatcccattactgggtacatacccaaaggattatatatcatgctactataaagacacatgcacatgtatgttcattgtggcactattcacagtagcaaagacttggaaccaactcaaatgtccatcaacgatagactggattaagaaaatgtggcacatatacaccatggaatactttgcagccataaaaatggatgagttcaagtcttttgtagggacatggatgaagctggaaaccatcattctcagcaaactatcgcaaggacaaaaaaccaaacactgcatgttctcactcataggtgggaattgaacggtgagaacacttggacacagggtggggaacatcacacacgagtggctgccgtggggtggggggaggggggagggatagcattaggagatatacctaatgtaaatgacgagttaacgggtgcagcacaccaacatggcacatgtatacatatgtaacaaacctgcacgttttgcacatgtaccctagaacttaaagtatgaaatatatatatatatatatatatatagtcatgagggagagaaaatactcttagttacttggactaacccacgaagtaggacagtataatttgaaaaaggacttggattagttgtaaacgtataatgtaatatccagcacagccactaaaaatgattttgaaaaaagcagtataatcaatatactaacagaagaaaaagcagaatcaggccagacatggtgactcatgtctgtaatcccagcactttgggatgctgaggcaggaagatcacttgagccccggagttcaagtccagcctggcaacgaataagagcccatctctaccctccaccccccccaaaaaaaaaaagaaaaagaaaaagaggccgggcacggtggcttactcctgtaatcccagcactttgggaggccgaggtgggtggatcgcgaggtcaggagatcaagaccatcctgcctaacacggtgaaaccccgtctctactaaaaatacaaaaaaaaaaaaaaaatagctgggcatggtggcgggcgcctgtagtcccagctactcaggaggctgaggcaggagaatggtgtgaacctgggaggcagagcttgcagtgagccgagattgcgccactgcactccagcctgggagacagccgcaagattctgtctcaaaaaaacaacaacaacaacaaaaaaaaacaaaaacaaaaacaaagaaaacgaaaagaaaaagcagaatctttttttttttttttttttttttttttttgagatggagttttggtcttgttgcccgggctggagtgcaatggcacgatttcagctcaccacaacctccacctcccaggttcaagcaattctccgggctcagcctcccgaatagctgggattacaggtgtgcaccaccatgcctggctaattttttgtatgaaaaagcagaatcttatacaatgctcaattaaaatcagggagaggagaaaaagagtagaataccaaaaaagtaacaaattacaaggttgatataaatagaaaacaatcacaaatactgagtatactaatctaagtatatcaataatcactttaaacatcgcttaaaagacagagattgtcagtggattaagaacaagacccaaatatatgttgtctatgagaaatgcactttaaatagctgggcatggtggtgtgcacctgcagtccttaggaggccaaggcggagtgtcacctgagcccaggattttgggactacagtgagctatgatcatgccactgcactctagcctggttgacagaataagacctcatctctatagaaaaaagtaagtaaatctactttataaaggcacaaatatattcacagtaaaggaatagagaaagatatcccatgctaacattaatcaaaataaagtgaaatagccatattaatttcagacacaaccgactttagaacaaggaatattatcagagatcaaaagggacattccttaatgataaagggatcagttttctaagaagacataacaatccttaatgtgtacgcactgaacagcagatcatcaaagtacatgaagctaaatctgatagaactgcatagagaaatagataaattcactcttagagttggaggcattggcatccctctatcagaaatggacaggtttagcaagcagaaaatcagtaagggcataacatgatcaatcatgatcaaaaacttgattcagtcaactatatgtaactgacatctatggaccactttacccaacaacagcagatgacacattttctcacacacacatgaaacattcagcagaatagaccacattctgggctagaaaatgcacctcaacaaatttaaaagaatagaaatcatacaaagtatgttctcagactacaatggaatgaaagtaaacaaaaatcactaaaaaagatagctgaaaaacatgaaaatacttggaggttaaacaacagactgaaataactgaaggtcacagaagtctcaagataaatttttaaaatatttcaaactaaatggaattgaaagcacaacttatcaaaaatttaggaacgcaacaaaggcagtgcctactgggaaatttataccactgaatgtatgttaaaaagaacaaagatctaaataaataatccttcccattggaaagctagggggaaaattcaaattaaattcaaagtaagcaagtaaaagaaataataaaatatgaatacaattctgagtggcctgatatctgatttctggaagctgagttttatgtggctttagaagtttcatgttatgagtgtgaaatggcaagtgaccatggcgattgcttctgatatggccacctcaattacatagagaagggatgatcagtggcatcatcccagttctgcatgataccacaccagtgattctccaaagtcaagaaacctgtatatgttgtccttgtgtttggtgaatctgtggtctatagactacataatgggctatttctggggtactgaccattttgctccattaaggaaaaccatgcatgagccatataactatgggaaacaatgttttcctttttgacacctggcctactctcttcttaggtgagagcaaaggaagagcaccacttggcctgctgcacccagggcaatttataccatccagatatccagcactgaatatgtagcaactccaatccaccatagaacattaatctatctctgataagcatgctaatatctatgattctgcctttgtggggagatgactccatagattaaccccctggcttggggcaatatggagatgttatattgtcttcgacagggaagatgacataaaaattatgttcaataggattatgtggagacttaacataagtgacaaacctaagacaagaagttagaaatccttgtttcttttaggtgaataattttggagcttgagaaaaagacaccattgtggcgaacttgctttgccaaaccctgtgtatgcatttttgggtaaacaacacattttcatcctttaagcattgtttccattatttataattcctaatagtatgagacatttaggactcattccttggttcttcttctctcattgtatctttcattgtatctttcagtgctgcaagagatgcaatcatcccattaatgaaagcagagtgactgccttcgtcacacatacattcaaaatagatcactaggctagtgatgattctctcttaaggctattatgtttactcatttaaaaaatctggatctcagtatagattttcttctcagtgagtgactgacctatctgatatgatgctatgacaaaatctttactttttacctgaatttggtgggattgaaagttgagaacatattaatttattttctgtttcacttgattaataatgcccaatctaacatgcagtgttcacttgggtacatatatacaactacatcaaattttttcttgttttaccttaaaagtgttaagatattgtaatggtatggccagtttactcactggtaaacttttcataacagaaatatcatgccagtggacacaaatatgtaacatcagtaatttgctttcctcatgaaacagagaactgaataagttgatgggtaaactagtatctgaattataaaccccaaatatcatgtgacttcatcattttcagtataatgaaaatacaggctgtgaatgcttccagttggtcctgaaagggcctttgaggtgagtaggttcaccaaagcggcaacatatgtgtcccagtgggcattctactcctcagtaagtgacttgacattctttatggcttcctcatgattaaaacaagtctttttattgaaattttactgaaataatgatgaaacaatgtaatattcttttcatctacatataagagtagacatagattaacctctaccttttttttttttttttttgagacggagtctcgctctgttgcccaggctagagtacagtggtgcgatctcagctcattgcaacctctgcctcccaggttcaagcgattctcctgcctcagcctcctgagtagctgggattacaggcacgtgctaccattcctggctaatttttttgtaattttagtagagacatggtttcaccatgttggtcaggctgttcttgaactcctgaccttgtgatctgcccacctctgcctcccaaagtgctgggattacaggcttgagcccccgtgcctggccttcacctctacctattataatattttcatgttattccattttgtcatgtttgtgggtcatttgatgagggttcacaatatgaaaactgggcattttggccaagatgcatgtaaatgaatacaactccatgtgccctgataactgatttctagatcctgagatgcaagtggcttccagagtgtctgtattttatgaaagttcatatacagtaaaccatgctaattgttactgatacagcttccttgaatatataaagcgatgattaatgggatgttttgtttctgcagaaaaccactgaattgcttctccaaagccaagtgacctgtatgatttgtccttattatattttgtgaaccagtggactaaaacctttataatgggtcatttttttagtattgtcaatattgctcaattaacaaacatgactcatatacacaggtgagatgtagttctccctttgacatttgctctacatctgtcccttagatgatgatatggaagaaaagcactctttggcctgttgtgactgggacagttgacagcacccaggtgtcctttaatgaaaatgctcttgacaccaatgcatcctagcatcacagcttcaggaagccttctcaagtgtgcatggggagtactatgtctttcatcaataatgaaatcttctgatttggtgagaaataatgccttaaaattacactcaataggattatgctgaggctcagcctacctagatgaaaatgctgaaacagataatagtgacttcttatttcccttcaaggggaattttattttgaacttgaaataacaaaatctttatgggtaacttgtttgcccaactgtatcagtgcacctataaatgaacaaaaaattctcagcctataagctttgcttcagtgacctttaatttctaatagtaaggtatattcaggtctcattctttggctttttctcttattgtgtatttcagtaagacatgctgccaagagatgtgccattctattataaaagatcagtagcttcctttaccgacgtgtatattctatctagaacattgagctatggaagactcccacctaagggaattagttttacaccttcaggtaatctgaacttcaatatgagttttgctttatgatataatccttatgacaaaatctttactttttatctgaacttcatacaatcaatattgaagattttttaaattcactgttacctagtccaatatttaatatacatttggctgtagatacatgactagacaaaaattttttatattattattgtgggggctctaacagtgtttcactgttttgagttactgatgaactttctgtaactgtgagaccatggtaatggaagagaccgtggtaatggggaggagaatgtgaggatcagtatgtactttgcctataaaacttaaatatttagtaatttgatcaccaaattgatactcaaatttcagttcctatcatgtgtaaaccaaaaagtatctgagatttagaagtttatttagaagtggattttgccaaggttaagcacatgctcagaagaaataaacccaaaatcacagaaaccgtctggggtctatgtctttctccaaagatgattttgagggcttcagtgtttaaaggggaaaagtgggctggagggggaaaagggagggtatgataatccgtatgttccaagacaaaaggagcaggtaggggtatagtcaataatgtattcatctcatgctcagtaaatcagcactttacataagataaggtgaacatagagaagctacctgtggagatctttaacctttaatctgtagctatctgcttaagatcaaaaggaaattcttgcatgactcagctttcagcttattttttttttctcttggcgtagtaaattggggtcccaagtttattttcctttcacacatgtgaccccactattttcagaataatgaaagcacatgttagaaatgatgacacttattcctaatatggactttgaaatgactgggttcacaaatttagaatcatggatctcattataggtttttattttcaatgagtgactggcctacttgatggaattctttcaaaaaatgttcactttttactgagattatattaaaataatgttggaatgtgttcagtcatgtttaccatctctatagtatgatatatgataatatcgcagattactcagtgtcaaaaacctggcataccttgtccttatgatgttgatgagtcaatggtctagagccttagtaatatgtctttttgtggtagtacggaccgtatctgtccactaagaaatagcctgtgtaagccatatacacatgaacaatttatgtctgattttgaactatggtcccattcctatgcctgtagataaagactgctgagaagagcaccctctggtgttgtcacagaggcaagtgctaccgcacaggcatgctgcagtgaatttaactgatcctctgtccctgcaaccgttgtttaaggatgctattctggtaagggtttacaagacaacgtaaatatatgtataaagagtatcttcaggagacgtaataatgtaaaaatcatgctcaatagaattaagctgaggctcaaaatagtgccaatccttgcaagaaggtgtgagaagtcattagatttggggggtatgggttattccattttgaacttggtaggaagaaacccttgggggaatcttacatcatttgcctctacctacttctaaaggaacttttaaaattcttttatcttgtctttattcttaatactcatacattattagagagaatatcttggtttattttttcctcatggtgtgcttcagaatgttcatccagcaagaggtgtgtcattacacggattatatatatgagttctgtctttcgtaattaaaaaatttcaagtggaccatttgaatattaaacattggccttcaaaatgattacatttacctgttcatacaaaattagtgagcaatgatctattctttccaatgagtgactgatctaatgaggtcctcattaaaactccttttttttttttttttttttttgcctgaacgtactttgatttaaagatgtgacatttagtaattcattgcaatcaactctttagtgattgcacaaatagacaatccttttctattattttattttttggttgctgtgtatggtgttatgatgtttgtggatcattgaggcactactcacaactgaaagactttggcaattttagggaatggcttgagattcagctataggttacccttgattgaaattgaatacaatacaggtagtctgaaatctcatttccttatcctgagtctcactcaggtgtcattagattcattataaagaaatgcatacactatgtatgatgccagttgttactgatatgaagacgataagaagcttttatttctgcagggaaataatcccttaccaggtcatcaaaagacatgatacctatgtgcttggcccttactgtacacggggaatcagtggtctaccacagcttaagtaacgggtcatatttggagtatcacacatctcagtcttgtagaaattaggaacagcaattaggagtcatgcacatataagagatgtaatcccaccctttgactatagcctactcttgtcttttacagaaaagactgtggaggaagaaaaccctttaccctgttgttcagggagaaactgacaccactcaactgcctggcactgaaaatgtggcatccagtccactttaccatcagtgtttaaggaaaccatctctggtaagcatatttgatccaagtgtgcatatgcacatgagtgccatgggctgggtcaatgatgagatgttaccttgaagagaaatgatgacgtaaaaattaagttcagttggattacgctgaggcccagcctaggtaacaattgtgagacaagaagtttggatttcttagtttccttccattggggactttattttgggattctggcaatggaatcttattgcgaaacttgttttgcacgcttctatctgtgtgcttctaagtaaactataaattctgattctttaagtgctatttaagtttcctacaattcctaattttcttggatatttggcactaagacccttgctctttttctctcattggatgatttagtaagtcctactggcactattctattgagtggaggtgagaggctgcctttgctgactgaaaaatttcaaatagataattgaactagtgaagactgagctctataataattagatttattcattcagacaacatgaatatcacgatagggttttcttctcaatgattgactgacacatgtgatgcaatcctcatgagaaaatccttacttttgccctacgattgattgttttcagggttgagaaatatgatacattggaattttgctcaatgcgctacagttatcgtggtctaaatatacagacaaaattttctgtaatgttagtataatattttaacagtgctaggatatgttttgatcattaatgaatctttatgacttaagggtccttgcaattgggataaaaatgtgagtttcaataatatgtgtttgcccatgaaacttgaaattagataaattgatgagcaatctggtgcctgacttttctttctcaagtacctttggcttcgttttcattatgatgaaagtgtgtgctgtgaataatgccaatggtaaataagacctttatggacacttatatgaatgacagtcagggccgttccttcaggccacatgattatcgttatgcattcttcttctcaatgagtgactagcatacttgccaggatctacaagagggaaactttattttttactaaaattgcatcgatataatgttgacaagttttgtgattattggtatcatctctaagatgtgatgctcatttggtctaaatatagaagttaacatattaacttctaatttatatatgtcaggttgctatgtttttacaatgtttgtggtttattgatgatgactcacaacataaagactatggcattatggctacatgttctaattctgatatatacatatcccatcattcattaaattaaatacaattatgagtagtatgatgtctgttttctaaaatctgagtttcacctggctccagtatgatcattatatgatggagtgcaagcaacatgttaatgccaattgttattgatatggcttccttgaatatgtaaacaagactgatcaattgaaggtcttatttctgcattaaactacctgagatattctccaaattcaagagacctgtatagttagtctttattctgtttgatgaataaatggcctatagcctatctaatggatcagtttttccagtactaatcatatctcttcattaagaaatagcatgcataagccatacatacaggaggtaatatttgtcatcttgatctactgtcttatcctcctccccttagataaggatgactgaggaagagtactctttggcttgttgacaccagcacagctgacacacccagatatctgtttggtctcctgtgaactttcaaccaggatttaaggatgccactctggtaggtattttcagacaaagtgaatatgtgattgtagagttccatggcttgtttcaacaataagaccttatgttgtcttgaggacatgagatgacatgaaaactagactggctggtccttatcttttctggggtattctagtttgagcttaagataaagaaatatatttgggatatagtttctctcacctgtttctattagcttctagaagaccacttatcaattctttcctcctgatttagtggaaaacattttggcagttcctcaaaaagttaaagataaaattaccatgtaacccaacaattctgctcctaagtacacactcaaaagaattgaatacaaatgttcaaatgaatacatacacatgaatgttcatagcagcactattcactggctggagttccagaccagcctggccaacgtggcaagaccctgtctctactaaaaatagaaaaattagctgggcatggttgctcacgcttgtagtctcagctactcaggaggctgaggcacaagaatcacttgaacccaggaggcagaggctgcagtgagctgagatcacaccattgcactccagcatgggtgacaagtgagattctgtctcaaaaaaaaaaaagtgaaggtatgatgacaatgtcacacaaaatagtgaataccaataaaaagatagaaattattaaaaagaaccaaatgaaaattctggagttgaaaagtacaataactaaaatttaaaaatttattagaaaggctcaatagtagatttgaactgggagaagaaacaagaagtaaacttgaagatagaacaatagagattatgttcaaaagaacagaaagcataaagaataaagaaacaaagagagtctcagagaatgtggaacatcattaagcataccagcatacacatatgggagtaccagacaggcaggggagatacaaaggatcagaaaaaaatatttgaaggaataatggctgaaacctcccatatttgtggaaaacaataactgacatatccaggaagctcaatgaattccaatgaataaatgcaaagattgacaaatggaaacatcacagtaagatatctgaaagtcaaaaacaagaagaaagtcttgaaagcagtgtgagaaaaatgatttgttacttacaagggaaccccaggaagattaacagctgacttcagcagaagcaatggaggccagaagcaaaggcataacatattaaaaatgctcaaagaaaaaagaacctgtcacctaagaattctgtacctggcaaagctgtctttcaaaaatgaaggcaaaataaagacttcctcaattaaaaaaaaaaaagttggagaatctactgctctcaaaacccccttaaaagagttctctaaatacttaaagaagttattcaagctgaaagcaagtgagcctaggtagttattcaaatcaacaactacaaagcaaatgcttgtaaaggtaattatataaatataaaagacagtagaaatgtaatttttctctgaagtgattttaaaataaattctataaaataatatgtatataatgtattttggggtctataacatataaaagtgtaatatatttgccaaagaagataggtggatgcaaagcaatacaagactaaggaaatgactacagatggtagattaatatttattataatgtctttcttggcttatagcatcaataaatgtaatatgtataataataccacaaaagatggcaaaaagggaatagagctatataggtgtaacatttctgtataagactgaaattaagctagtgtaaattagaaacttatttgggtgagttaagatatatgcagtaaaccctagagcaaccactgaaaaaattcaaaacatatagtgaaaaaaattattaaggaagtttaaatgctacattataaaataattacttaatgaaaaagaagtaaagaggaatagaggaacaaaaacacatgagacacagaggagaagaagaatgacataataaactcaactaaataataaaattacatgtgaatacagtaaatatgtaaattaaaaggcagagattcccaggctggataaaatctccaggtttaatatccctttgccccaaataaactccagctttttttcctatgatgtatttgatcattgtgctggtttacaaaagatttctaacctttctaaaatctttaaaatcagcggcgaagtgttctatctcatttcacccatatatatcagagactcaaatcctgaaaaataccaagttgacctgcccattcttgagttctgctgaatggtgtgttcccagatcactatggatattgctgtttacttgaccaattacttttagtcaacaagatttgaacaatgcttttgattcacacagcgtgagacctagacttccctcatattgaaataggagcattagcatcctggattcctgcaccggcttttgaaccttatgtttcctgcaccccaagaagccatgttatctggacattgtcctctctgtgatgggaaagaagagttttttcaacaaatgttgctaggacaactggatatctagatacaaaagatactgcatttatgttaccagttttctgtgtcagtccattttgctctgatgtaacagaatactgcagactgggtatttgtaatgagtggaaacttattggctcacatttctggaggctggaaagatcaaggggctggcatatgataagggccttctcactctgtcatcctatggtagaagggcaaagagagggtatggatgggacaaatatcttcttttataggaacccacccctgaaataacagcattaatccattgatgagggcagagctctcacagcctaatcaccttttttttttttttttgagacggagtctcgctctttcgcccaggcgagagtgcagtggtgctatctcggctcactgcaggctccgcctcccgggttcacgccattctcctgcctcagcctcccgagtagctgggactataggcgcccgccacggcggccggctaattttttgtatttttagtagagacggggtttcaccgtgttagccaggatggtctcattctcctgacctcgcgatccgcccgccttggcctcccaaagccctgggatcacaggcgtgagccaccgcgcccggccgcctaatcaccttttaaatgttgctttattaaacactgttgcattgagggttacgtttccaagacaggcttttgaagtgaaatgaaaaatttgaccattcccaattatagtttgaaatttcaatgctcctttcttagtatgtgattgaacatggataagataatcagtaacggtggatgtaagaacactattaaccaacttgactccactgtcatatgtagaacacaacacccaacaatagcagaatgcacattatattcaagtgctcataaagcattattttgtatatatgtattttctcccttttttgataaagttagctagtagagtgcctatgtagttaatattttttaaaaaccacaggcttctcaattattaattacatctatggtttttaaaatattatcttcattaatttctgctttgatccttattcctttctttcttgtactttcttttatttttgttcttttttagtgttttaagatgaaaattgaattgtttcattcatctttttcattttttaaaataaaaacatttagtgcaatgaattttcctctagaactgcctttaaatgcatattacagattctcatatgttgtatattttaaaataatatgtaaatatatatttgcatagaaaaacatatttacatacaaaatatgtatttacatatttaaacatatgtattttctgtttatatttttccttttactcaggagttaataggatatttttaaaatttcttggtgaaagcgcctttatcttattgttagtaaagtctatgtttttgcattgtgatcagatagtgcagtttttaatatttcttgagttactaatttttctttccaacctaatatataatcagttttttgtgactatgccatgggcacttaagaacaacacagatcttctattatctgtcaagtttaatatgtagccataaaatctaccttatttttatgttgctatttttgcccacttgatctgtctttttctgataatggtgtattatagttttctattatgggatcatctatgtcttgtctccttacatctcatacatctcatgcagttttttattcataaaggtggttattatgttatttggtatataagtctccataagggtcaaatcttcatgtgtattatatcttttagcataaaaaaagtgtccttctttgccttgattaacatggtgggacttgaatacattgtgtgatataagaattactacgcttgcatgcgattggcatgaaaaaaaaaaagattactcctatctctttttgttttcatgtgcctgatatactttcgcccatccctttattttcagtcttttagaatccatttgttttagattcatctctcatagaaaacatattatgttttattttgtgagcccactgaaaatatttttcttctagtaggtgtgtggagtccactcacgtgtgtgtgtgtgtgtgtgtgtgtgtgtgtgtagctatgactgatatttattgtgtttgtattttctttatatttgctacgctcttttgtcacggtgtagtctttgcttgcctatttattcatacttaggagagtttttgtttttgttggagtgtttacttttgtacctctcttaattctgttagttctgtgttttcctagttaatcttttacttctgatttatcagtttgggggatgttcttcagcactcccctattctcatgcaaagtgctttcggttttcctctttttttttttttcctcctcctgtgtttagttgtcttatttctactttgtcacaatattagtgacatttgtatgctagtcttctaccctggatagggaatatacacctgtcagatggaaggaatatcatgttgtatgctgctgtcaaatagatcctaacatactttaataatcttttaaatgatataatccaagttcatagttaactcctgactttttatttctatcatattcagtagatatatcagcattgacagccatcccactgcaatatcacttcacattttgcttagaccaaagggttctgagaagcttctggagctgttgtgaaagccagtttcattaaagtcaagtcagacatccacctgtgctgttttctgctataagctgaatgcaggggatacaatgttaggagcatcagtgtggtatgaggaatgtttacttattggtagtagacttgtctggatcaaggataagtacaagtatctgagatgctgaggtgtggctgaatgaatggccatctgttctattgcaacaggataaataacacattcggagcaggcctaactggtgaactcctcaattatctcacaatagcactatcacgtgtctttcatttttcacagcacagtgtattttcataaaatctttattggtagaccacaactttagcatttcccattcaagatacaactactgtgtcacttggatagcttggtagagaggaaattggctattttcagagtaaagaattcaaggaggaaacagattataaatgaaatgacaaaggtgatgagatcaagcaatgctgacgtttgtagcaaggagtagagggctgagatgcctgtatgataagaaattataatggaaccaatcttgtgctttattttttattaatttggagcattctctgatctgatttattttctatgtgatattttgctgcaggttaaaagctgaaacaacttcaaggaaacttcagggaaaagaggtgagcagccactttggtacttttgaaattctttgttctgtgggcaatgatgtcagaatgtcaaagactgtgagttcattatttcagaggcttaaaggagattattcttttggtagatatatttccccatgggtgtccctaccttgttcaaggattccttattattgtttcttctctttgtttaaatctctttttgagatgacctaaacaactgtggagaatcattgatatatttccttttttcactgttcatgttgggtgaaaataatcttgtagtgaaattcacatgttctaaatattgtttttttacatctttatctggcacattcataacatagatgtttctatacatattagtactgtaatcataccatatattattctgttaccccacttactccttaaacttttagttaattaaagagtttttataaagtcccccaatagattttttttttttgagacatagtctcactctgttgcccaggctggagtgcagtggcgtgattttggctcactgcaacctccccatcctgggttcaagcaattctcctgcctcagcctgccaagtagctgggattacaggtgcctgccaccacgcccgactaatttttgtattttcagtagtgacagggtttcaccatcttggccaggctggtcttgaactcctgacctcgtgatccacccgccttggcctctcagagtgctaggattacaggcttgagccactgcacccggccagattttaatctaattttattagaacaattcagtcatatgttttttcatgctatgtatatgagagttccattattcagatactaaacaaatgtctactgtacatttactgttctcactgatgatgcattagataaccatgcacaaaataagcctggctgtggaaacgcttatttgttgggagggtgcttgtttggatcgatgatgagaataattgtctgaggatgctgagggactcattccagatgtcaatctgaggtccagatgtgcggccctccaataggacaaataagactctcagagcctggctctatttggggatccctcagtgacaacatagtacccctgtgagcgtgccttttctatctcttcgaagagggcagtggcatcctgtcttatgagtcagtgtgcactttagtgtgcctagtgacccaagacttgctttaattgtagatagatacttacatataggaaatatttcttaagtaacaaatgaaaaactttagaagattgaattaagggtcaagcaactgtgatatgtctgaaaatctcattagtgttgtgctgaaagaaggaaatatggcatgcctctattaaataatgacagtggaaccaagtttattgctttgttatttttactgtggagtattttctaagattatttttgctttttttttctttcatgttttgctgagatagaaggcctggaatctgatcctccacttcagagaacaggggtgagtagctaagccattatcttttgaaattcatatgtcatgtgctctttgctaggtctttaggtcgttttgtacatcttttcagaagcttattggaggacattttcatgatatgtccttttcctcattgagaccctcaccatgtcacctacactattgaatccttatcatttctcttttaattttaactctcttttgcttttatggaaaaatgtagaatttaagagaatttttggcaatttcatattggatcaaaatgtattgtagtgaaatccaggtgtgccaaaatattaacagattttccccatctgtttaattattggggtttcagaatagagactccatggttcataatatctttgtggtcatactacattatatttctgcttctaatttaattattaaatattgacttgaattagtcttttcctcattgttgcaacaaggtaagttatataggaaattttcttctcttgatggcatgtctgagataatcatagatataagacacctggctggtttctagaatgcatgtaatttttatttcttgatctgtgtgttgagtacttgctgtgattgcatcatgcaaatacattgagctttacaattttagtgtatgcacttttctacatgtatattattcttcgatagaaagtaaaaaaaacttatcgaactagtcaaaatattggttaatacataaaaaaagtctcaagtagattgtgtattacatggtgcttgttgattgatgccctcataatagatcaagtgggttctctctttagcacagggctttttagcaaatcatgtcatgagtagttactcaagtatttttattttaacacatttatattttttctatgtatattcttaaattctcttatacttttttctctgttataaaaacatgctgaacaatctcaagtcttaaggattgcagtattgtccccacatattcatgtattttggtactcaattctttatactttctttgacagatcacttgaactggcacatgtctcttgttttgcagagagggaattaatgtgataccttcatgcttttctattctatgtgctacataattgaatatacaagcaaatatagttgttaagatttagtgtgattatttctacaccacatgcaaagaagtttctcatagatcttaatagaggcccacatgcattgtacagtttagaatttggggaaatattgatgaagttgggtaaagtataaagccaaaagtcagaacagtgaactccttgcttaaggatttccttggagattacttagtcaatacacaactgataaatttaagtgcttttcaccttttgagttctcgacatactaaagctaaaatgtgtttcaacttttaatcctgcttccctgattttcccttttttagtctgagatcaaagagtttcagccataaattactgccaagagtaatcacttcattttaagaaagcttaacaatatagaagaatataaaattatttatgacagatgtatttttaaccttttccccatgctttccagaggaaatatgtttaatcatctgccctatattagggaaaaactttctatgctaatacaagtatctatcaatccatttatctttctatataagatgtattgatcataaccaattaactttactgtaaatgagctttagatttgacattttggtagtaatatatgttgtacaatctcctgaggtcctataggtcttgaggtctctatgtcaaaaactatagatgtgccagtgtcctcagtgaatgtgaaggacaccacattttccttagccatttcttgttttcagaataatggttatcaacattttgctactgcaagataccatacatttataatcggaatatgccagtttttatgcactcatgcctctgtttctgtagagcattcccagaatgagtaatgcttgaaaattaggtccatgtgatttctttaatgagttatagtcaaatcatgaaatattcaggttaccattatttcagtaatgtattagaatgtcaaggtaaagttatctacattgtatatatacacacaacatagatataatttatacaacatctatatttatacaacagatatatatttatgtatatatttatacaacataaaatatattttattatttaaacataaaatatattttattatttaatatagattcttaagtgataaatatgtttaatattattaaaataggttaaaataggttatagttagtacagtgaaaattggcagcccttttacaaaacatatgccataactatagcatttatcactgacagtcataccaggatagtcttttatttccaatcacttaaatattcctaattgcaaaagaaatttgaagactaaaattcagaagttttgaaagagccattgcctgggtaaactatacaggtttcagttttatttataataattatgaggccaggcgcagtggctcacacctgtaatcccaacactttgggaggccgaggcgggtggatcacgaggtcaggagatcgagaccatcctggctaacacggtgaaaccccatctctactaaaaatacaaaaaattagccgggcgtggtggcgggcgcctgtagtcccagctactcgggaggctgaggcaggagaatggcgtgaacctggtaggcggagcttgcagtgagccgagatcgcgccactgccctccagcctgggagacagtgcgagactccgtctcaaaaaaaaaaattatgtatatatttataaattaatacttaataaattaataacttgtgataggcaatgcaaagatgacagtaaaaggacaaaattgattagattgataaagtcctgttaacatgaagaaattgaccaggataccatccacactataaagttagagaaatttatcaggacaattccctaaaatactcttctcaattttaacattgtaacaggaatttttaaaattttggtattatgtgtgtttccttccagataatttgaacagattcatatttggtatttttaaaagccatatctttgtccttagtgctggcaatgtattcttgagaatgaacaaataagagatacgtaaaagcataagagaaggtatcaggttgaagtagtcaatcagttatacagaacacaaagaattttatcttgtataatgtttatatagctttatagaagtgtgctgaaagggctataaaacatggacattattatctcattgaaaggtccaatacgtactgaaatacatgcttttattttgaaccaaccaccctataaacgttgtatggcttatttagatgagagcccaggttgtgtgtgtctgtgtgtgtgtgtgtgtgtgtgtgtgtgtgtgtgtgtgtgtgtgtacctgacagggaagcaagaacatcgagttgccaatgcactctgtctatggttagaatcatgctgaaaacatggctcccccagttctggaatgagcccacagatcaagcattccccaaagacatagcaggctcaaatccctgtgtacacaatattttatgattatcttatgtcagtactttcaaagtatacagtttgtgtgaagacaaatccaatgtcatttttcttggctagcctatatgtgtggtaaatccattatttacttacttgcttcctgaaaattacaattagattaacaaactgcagcaaagtgggcatgatgagatagagattgaagtgtaagcttatgttaatgatgcccttggtttggataaacacatctaagagaaaaatggaaaaacacacatggcagggaagccttgatagagccaaaatataggattgtatgtagtaatgcaatccatagatgagcatttggcagtaatattatttttcagatatggataaaaattgcttaggagagtaaagagagacaaagttgaaagcaggtttatagtaggtgttgttttagtgttgatccctttttgctccaataatcaaagtgataaatattgaaaattgattcatgcagcattacttactccattctaatttttatatatgtcaaaagtgccatctcccaaactgtgctatccccttcaggagaagagactctgctgaagtttataaggttgacatattgccagcttcaataatgtaaagatgaagtgtatactgaattcttaatgcaaataacaactctattggaaagtaacccagttatagaagtgctaatttgtcaggagctgccttaccaagatcatgatgagtacagttatctcaggattctgaaagattgttttccgatttcaactagtctagctgaatgttccttgatagaaagagaggacttttagaattggttcaatatgatgacctcctgaattatctcacatagcccgtttgtacatgcctttcttttctctcagaaaatggcactatcataatagctttcttacacagacttcaccttagggttttacattaagggaggggtctggtgtttcatttattttgaagtatttgttgttgattgtgtacagtgcttgagtaaaaaattgaatatagaaacatctagaatatttttttaaaggatcagtgtttataaagtgaattattagtgtcaataatgttgggaaagttttaagagaatataggaaacttgaacattacacaactacaatgggaccaaattgtggggtctcattatagttaatatttatgtatttttttccaattgatttgtgtgctttttttctgcatgtttttggcagatagaatggctataacaagtaacagcatgtcaggtaataaaaataagcagagccctattcctttaaaaatcttcactgatgggagggccataaaataagtcttaatacatttaaagaattaaattcatgtaaaccatgttaatttaattccacaatgatattgaattagaaataagaggaatatctcttgaacatctcctaaatgtttggaaatttaaattagcatttctgacctatttattggttaaaaaagatacaaagaaaggaaaattgaaaagtcttttgaactgaataaaaataaaaatatagaatctaaaactttatgggatactgacaaaacaggatatagggaataatttatagcactgaaatgcctatattagaaaagaaaaaaggttttaaatcagtaaatttgtattttaccttaagaaacttagaaaagaacaaattaacccagacttaagtaaaataaaggcactaataaagataagagcagaaatcaatgaaatataaaacaacaaaacacagagaaaaattgagaaaatttaaaaatagcctagtgagaagatattgataaacttgtaaccagaccaatttaagaaaaaaagtcaaaacacaaataccaatatttgaaaatgtaggagggcaaatcattacagattctatgaatactaaaatgataataaggaaaaattatttaaaaggggcatgtcagccaggcatggtggcttacccctgtaatcccagcactttggcaggccgaggtgggaggattgctagagctcaggcattcgagaccagcctgggcaacatgttgaaaccttgtctacacaaaaagtacaaaaattagctgggtgtggtgttgcacacttgtagtcccagtcacttgggaggctgaggcgagaggatcacttgagcccaggaggttgaggctgcagtgagccatgtttgtaccactgccctccagcctgggtgacaaagtaagaccctatgtaaaaaaaaaaaaatgtatgccaacatttttcaataacttaaatgaaatggaaaaattccttgaaagacacgaactacaaaaactcagtgaacaagtaaataacctgaatagccctgtatcaagtaaattgaatttgtagttaaaagccttccaacagagaaaacttcaggtacctatagcttcatatgaaatgaaaaaaaaaataccaatcctctacaagattccagaacatttaaaagaagggaatatttcccaacttattccatttggacagcaatacccaggtaagaaaaagagacacagaaatttaaaaagaagaatatacattattccttaggaacataaatgcaaagaaatctaatcaaaattttggcaaatgaaatgtagaaatactttatgaccaagtgagagttacccaaagaatttaaggttggttttatatgtaaagatcaaccaatataggaaaatcacttctggaaagtcagagtaagaaactccaaaaatctactcctccataaaaccaataacagccttgatagaaatagttgaaattaattttccaaaactttggaaattaaccaaaggcttacaaaattccagagaacattaattcaagaaaaatggctgaatcagtaagaacagccagctttgtggcattttaatatgaccccttcccatgcttttctccctagtgctgagatagtcttaaaaattagcaggatagcaaccactggagaagaaaggtttggaaatttcccaaaaagttccatccccatagaattatcactatttgacctctaaagcccaatctataggatttatattcatttggactgactcagagctcactcagtaaggaaatctcaatttcaaggtattggtcaaaaagaatccatggcaattgttgactatcacaactgcctgaagtcttggtaacagttgggataaacaagaagctgatcaaaaactgaaaactaaaatcttgggaatgagatatctacaggatgcttcaaaaagctttgatacattcctgtttatctagaaagctacatgcaggctgggtgcagtggctcacacctgtaatcccagcactttgggaggccgaggcgtgcggatcatgaggtcaggagtttgaggccagcctgaccaacatggtctctactaaaaacacaaaaattagccaggcgtggtggcgtgcatctgtaatcctagctactcaggaggctgagacaggagaatcgcttgaacccgggaggcggaggttgcagtgagccaagattgtgccactgcactccagcctgggcgacagagcaaggctctgtctcaaaaaaaaaaaaaaaaaaagccacatgcatgtaattgtttacctctggctttccttttatgctctgggcaagctaaggaagagttgtgaactacctaagtgctgaatgggaaccataacacacacacacacacacacacacacacacacagcaccttagtaaagggtgagaggcatgttagttagaagcattaaaggaaatctctttctagtcattatctgtgcactaacctaactgagcagagacttcagtatccacatactacagggcatataaactttacagaattagtccaggaaaatcatatctaaaaaaaaaaaaaagcagtaacaaaaataaactctgggaaaggggagaatatgatttaaagagttgccacattatacataatatgtctagtgttcaacaaaaaattacgagacatgcaaagaaatagaaaaatatggcacaaagaggataagatgaagtcagtgaaactatcctcgaggaagaccagatgttggtcttactagacacagacattgaaccagctattaaaaatacgtacacagaactaagaaaaacatgtcaaaagggttaaagaaaggtataaaaatagtgtcttaccaaatatagactaccaataaagagatagaaattataagaaaagacaacatgaaaaaatataaagcaaaaaaattagacaattgaaacaagagggcctctattcgcagatttgagcaggcagaagaaagaatcagtgaacttgaagatatgtcaactgagattatccagtctgagcaacaaaggtgggaaaaaatgaagaaaactgagcaacaaagaactgtagaacagcatctctcataccaatggatacataaactggagccctagaaggatgaaaaaaggagaaggaaagaaaacttcccaaattttaagaaaaacattaatttatatacccgagatgaccaataaaatccaattaagataatctcaaagagaccaacacctatacacatcatagtcagcgtgtcaaaagacaaacataaggagagaattcttgaagatagtaagaaaaaaattattcataacatacacaccatcctcaataagtctgacaattgacttctcactgtaaaccatgcaggctaaaaaggcaatgtacataaccaaagtgatgaaataaaaaccttcaaccaatcattctagatccaacaaaactattgttcaaaaagaagaaatgaagacattcctaaacaaaatctcagagaaatgttctctataagacttgtcctaatagaaatgctaaaggaactccttcggtctgaaatagaaaggcactggagagtaaatcaaatccacgagaagaaataaagagaaccagtataagtaactacatgtgtaagtttaaaacaaagtataaatttattttgtttgtaacatttgtcttttcctatttgatttaaaatataatctcaattataaacttgtgttgatggtattatataaagatgtaattttgggttatagcaccaaaatggcagaataggaattttctgtaggtgtttcccacataagtatcaattttgacaaccatccatgggcaagagtaccttgtgggagttcaggagttgacagtaaaacttcagcacaccagaggagtaaagaaatctaagaatagattcattggaaagggtataaacagtttcactttacctgcatcaccaacccccaaaagtggcacagctcagtaacaagagcccattatttcttccacagaggaaaaggagagtataataagtaagtgtccagtttctcaagacatacaggcccctgcccaagagatccactttattttcatctcacccagaatattgaggtgatcagcaaggtggagtggttgggagagggtaaaagcaggaaagagagatggggactcaaacagcagcccatacttggaactgccatagatcctaccagttacttcatggactccatcaggaacccacctataagccacaggggatgcatccctcccatcttgccaacaaaaccccgaatgctccaaatgcctcacccactctttggctggctcccaagtgcgctcctgtgaaaagcgagtgagtatctctgcagatggcttgcaagcacatgttgacagctggctccactctgtagaactggaaaaaagctcacatacatgagaatttcaggacactaccctaaaaaaaaaaatgagacttcagcacctggcctggctttatgcaacctagagaaggtgatatgatttggctctgtgtccccacgtaaatctcatgtcaaattgtaatccccacgtgttggacaagggacttggtgggaggtgattgaatcatgcgggtggacttccctcttgctgttcttgtgatagagttgttatgagatccagttatttgaaagtatgtagcatgtcccccttcactctcttgcactcctgctccaccttggtaagacttgcttgctacccctttgccttctgccatgattgtaagtttcctgaggcctcccagctatgcttcctgtatggcctgcagaactgaactgtgagccaattaaacctcttttcttcataaattatccagtcttaggtagttctttatagcagtgtgagaatggactaatgcagaaggcatacaacctttagaatttgcccccttgagggaacaagatgtgtgaagcaggttcatccatagaaaatgtctgagagaacctcaaaatccctaacctgactaactgatgaaagtgtttctctcctaaggccagtcagtaaagaccagagggggtgactgtttctttaaatgcaaaggcagcagcacaataattcaagaaacatgaaaaatcaagaaaacatgacaccaccagaagaacacaatcattttccaataaccaactccccaaaaatggagatttacaaattggtttataatgaattcagaacaattatgttaaggaagctcagcaaactaaaaggaacaccaatagactactctgtgaagtcaggcaaacaattcatgaacaaaactagaaattcaaaaaagagaaaaattatcttaaaagaaaacccagaagttatggagctaaagaatacaatgcatgaaatgaaggagcgtatcaacagcaaagttgatcaagcataagaaaaaaaaaatctgtgaaactgaagactggctatttgaaattattcatcagaggattaaaaaaaaaagaatgaaaagaaataaagaaagcctacaggatgtataaaacaccatcaagagaactaatataaggattattggagtcataaaggagaagagagaaaagggtagaaaacttatttaagaaataatggctgaaaactctccaaatctaggaaaagatatgagcatccaggtatatgaagctcaaagatccccgtacaggatacattccaaaaagacttcaccaaaacacatgataatcaaactgtcaaaagcaaaatcaagacgatgaataaaccaccaatcactaagagggagacaggattcttatgttgtcattattatttacatataatttcagtaaatgttattggaaaatttataatgttttaaaaaaagaaatttgaaagcaccgaaagaaaagagactcatcacatacagggaacccttttaaggcattcaagagatttctcagtagaaaccttacaaaataggagagagtgggatgaactatacaagtgctgcaaggaaaaaaatgccaaccaacgctttacctggcaaatctgttcctcagaaatgaaggagagagaagaactttcctagacaaacaaaagctgaggcagttcatcaccactagacctgccttacaagacatactaaggggagttcttcaagctgaaatgatatggcaatagttagtaatatgaaatgataaacctcactggtaaaggaaagtacatagtcaaatttagaacactttgatactataatgatggtgtataaataattttactgtgctatgaaggttaaaagacaaaagtattaaaaaaaacccatagctgcaatagcttgtcaatgcatactacagtataaaaagatgtaaattagaacattaaaaacatagcatgcaagggtagggaagtaaaagtgtagttttcatatgtaatcaaatttaatttgttatcagcttaaaataaattgttatacctatgttttatgtaagtgtcatggtaactataaaggaaaaacctctagtagatacacaaaagaaaaagagaaaggaatcaaaacataacactacagaaaattatcaaattacaaaggaagacagcaagggaggaacaaagtaaaaagagcaagaaaaaatttaacataatgaaaacagtaagtccttacgtgtcaataattactttaaatgtaaatggattaaattatccaaacaaaaaaacagactggacaaatggattttagaaacaacaacaacaacaaacaccgcacacacacacacacacacacaaaccacccagccccaactatgtgctgcctacaagagatttacttccactttaaggacacatacaggctgaaattaaaagaacagaaaaagatattgcatgcagatagaaaccagaagagaggagaggcatctatacttacagcatacagaaaagattttaagttaaaaactatatcaaaaggctaagaaggtcaaaatggtgaagcagttaattgttcaagaagacataaaaattgtaaatatttatacacccaatattgaagcacctaaatatataaggcaaatattaatacatataaaaggagaaatatacagcaatacagtaatagtagtgaacttcagtgcctccctttcaaaaatggataatccagacataaaatcaataaggaaacatttaacttaaacttcactttagaccaaatggatctaacagacattatactgaacatttcatccaacagtggtagaattcacattcttctcaagcacacatggaacattctccaggatagattatatgttagctcacaaaataatattacaaaatttaataaagctgaaatatcaattattttgcaccacaatagtataacactagaaatcaataacaagatggaaactggaaatttacaaatatatagcattaacatattcctgaacaaccaatgggtcaaagaaaaaaatcaaaataattttgtgacagcaaagtagaaacacaacataccaaaacatacaggacacagcaaaagcagttctatgaggtaagcttatattgataaacacatttaaaaaaagattttaaataaacaacattacacctcaaggaactacaaggaagaaaaaaaaacaagccccatgttatcaaagggaaggaactaacaaagatcagacagaaataaatgaaacatagactagaaaaacaatagagactattaataaaacttagagttagttttttaaaaaataaaatcaacaaacctttagctagactaaaaaaagagaagactcaaataaaataaaaaatgaaagaggagacattacaactgataccacagacatacaaattaagagaaaactatatgccaacatattagttaacttgcaatgggtaaatccctagaaacatacaacctacaaaaactgaatcatgaagaaatggaagatctgaacagatcaataatgaataagggaattgaatcaatattcaaaaatctcacaaaaagaaaagctcaggatcagatggcttcactggtgaagactgccaaccatttaaaaaaattaataccactctttattaagctcttccaaaaaaattgaagaggagaaaacactttcaaattcattataagaggccagttttaccttgatatcaaagatttaaaaagaacactttgagaaaggaaaattacaggccaaaacccttgataaatatagatgcaaaaatgctcagcaaaatactagcaaacctaattcagcaacacattataatggcatacatcatgaccaagtgagattcatgcctcggatgcaggatagttcaatataatcaaatcaacaaatgttacactactttaacagaatgaaggataaaaatcatatgatcatctcgatggttgaactagtttacagtcccaccaacagtgtaaaaatgttcctatttctccacatcctctgcagcacctgttgtttcctaactttttacagatcaccattctaactggtgtgagatggtatcttattgtggttttgatttgcatttctctgatggccagtgatggtgagcatttttcaagtgtctgttggctgcataaatgtcttcttttgagacgtgtctgttcatatccttcacctactttttgatggggttgtttgtttttttcttgtaaatttgtttgagttctttgtagattctggatattagccctttgtcagatgagtagattgcaaaaattttctcccattctgtaggttgtctgttcactctgatggtagtttcttttgctgtgcagaagctctttagtttaattagaccccatttgtcaattttgtcttttgttgccattgcttttggtgttttagacatgaagacagtgtggtgattcctcaaggatctagaactagaaataccatttgacccagccatcctgttactgggtatatacccagaggattataaatcacgctgctataagccataaaaaatgatgagttcatgtcctttgtagggacatggatgaagctggaaaccatcattctcagcaaactatcacaaggacaaaaaaccaaacaccgcatgttctcactcataggtgggaattgaacaatgagaacacatggacccaggaaggggaacatcacacactggggatggttgtggggtggggggaggggagagggatagcattaggagatatacctaatgctaaatgacgagttaatgggtgcagcacaccaacacggcacatgtgcacatatgtaacaaacctgcacgttgtgcacatgtaccctaaaacttaaagtataattaaaaaaaataatgctgctataaagacacgtgcacacgtatgttcattgcggcactattcacaatagcaaagacttggaaccaacccaaatgtccatcaatgatagactggattaagaaaatgtggcacatatacaccatggaatactatgcagccataaaaaagatgagttcatgtcctttgtagggacatggatgaagctggaaaccatcattctcagcaaactatcacaaggacaaaaaaccaaacactgcatgttctcactcataggtgggaattgaacaatgagaacacttggacacaggaaggggaacatcacacactggggcctgtcgtggggtcagggtagggggagggatagcattaggagatatacctaatgtaaatgacgagttaatgggtgcagcacaccaacacagcacatgtgtgcacatgtaccctagaacttaaagtataataaaaaataaatcatatcatcatctcagtagatttagaaaagcatttaacaatattcaacatcctttcagaactaaaaactctcaataaatcaggtatagaaagaatgtgcctcaacactataaaagccacatatgacaaacctggaggtaatatactcaatggtgaaaagtaaaaagctttgactctaagatcagaaccaaaacaaggatgtccattctcaccacttatatttaacatagtagttgaaattctagctagagcaattaggcaagaaaaaaggcacccaagttggaaagaatgaagttaaattgtctctgtagatgacatgatcttatatatagaaaacactaaagactccaccaaaatgctgttttaattagagcttaaaaaaataattcactaaagttgcaggatacaaaatcagtatacaaaaatcagttgcatttctaaacaccaaaaacaagttatccaaaaaattaagaaaacaatcctatttgtgatatcatcaaaaaataaaatactaaagaataccaaagaaactgaaaataaatggaaataaatggaaagatagcccatgttcatggattagatgaattaatactgttaaaatgttcatactacccaaagcaacctacagattaagtgcaattcctactaaaattccaatgacatttttcacagaaatagaaaacacactcctaaagtttgcatggaaccgcaaaagactcaaatagatgaagcaattttgagcaagaacagtaaagctggagacatcacactacctaacttcaaaattttattaatcaaaacagcatgacataaaaacagacagaaaagaccaatggaacagaatagagagcccagaaataaactcacgtttatagagtcaactaatattcaacgaaggtgccaagagtacacaatggggaaagtatagtctctacaataaacagcactgggaagacaatatccaaatgcaaaagaatgaaattacacccttatcttataccatacacacaaatcaaatcaaaattgataaagacttaaatataagacctgaaaccatacaatctttaggcaaaaactcattgacattggtcttggcaatgatttttttgatatgacaccagaagcacaggcaacaaaagcaaacctaaacaagtgggaccctaacaaactaaaaagtttctgcacagcaaaggaaacaatcaatcatcagaattaaaaggcaatttatgaaatgggagaaaatgtttgcaaaccacatatctgataaagggttaatatccaaaaatatataaggaatgcataaaattcaatagaaataaacaaacaaataatccaattttaaaatgggtgaagaacctgaatagacattttttcaaagaagacttacagataggcaacaggcatatgaaaaaatgcttgacatcactaataatcagggaaatgcaaatcaaagctccagtgaaataccacctccaactattaggatggctattatcaaaaactcaaaagaaaacaagctgggggaatgtagagaaaagggaaaagaagatccttatacactgttggtgtgaatttaaactggaatagcccttatggaaaacagcatggaggttcctcaaaaaattaaaaatagaactactatatgatccagcaatttcactattgagtatatatccaaatgaattaaaatcactgtcttgaagaggtatttgcacactcatatttatttcagcattattcacaatagccaagacatggaatcaacctaagtgttcatcagtagatgattagataaagagaacgtggtatatagacacagtggaatctatttagtgttcaaaaagaaggaaatccaacttttaaaatcctttaaaaagttaaactcataaaaacagagaggagaatggcggtttccaggaactggagggtgggagaatggggagatgttggtcaaaaggtacaaactttcagttataaaatgaataagttctagagatctagtgtacaacagcattactatagttaataataatattttttatacttgaaatttgctaagagtaaatatcaatattctcaatacacacaaaacagaactatctgaaggcactgatatgttaattatcttcattatagtaatcatttcacaatgtataatgaatatcaaaacaatagtgtacatcttaaatatatacagttttgatttgttaatcatacatcaatgaagctagaaaaaatgttgtaatttttaaaacaatagtaatataaattaggggtgaaggaattgacctatgttggagaaaagtttttgtaaactatttaaattaattggtatccattcaagctagattatttttaattgttaatttaattgtaatactaaggcaaccactaaaaaagcctttaaaaaaatatagcacttgaggctgggcatggtggccctcaattatatatataatatatataaaatatatattatatatatagtagatgaacaacaatgggatttaaatggtacactagaaaatatctgtttaacaaaaagaaagcaatagtggagaaatataagaacaaaaccatgtaagatttatagaaaatgaatagcaaattggttgacctaaaccctatcttataattatattaaagataaatgaaataaatactacatcaaaaggcagagattatcagaatagagaagaaaaatccaaaccataattcaaccttatgttatctgtatttagaatatttagagtcaagacacaaatagatagagttccatttgggcgtgaaaatatttaccatgcaaaatgtaattaaaatagagctagagcagcaatactaatatctgacaaaatatactttaacaaaaattgttgctaaagacaaaaaagaacattttataataagacacaacaattataaacatatacaccaaacaatagagcccaaaatatacaaagcaaaaactgctagaattgaagaaagatagaaaaatcaatgattacagttggaggtgtcaataccaaactttcagtaatacacagaacaacaagtcaaaagcaaaaaggaaataaaaaactacacattatcatacaacaccttaatacgatatccaacaatagcagaatacacattattctgaagtgcacatggaatattcttcaggatgacacatattaggctgtaaaacatatcttaataatttaaaagaattgaaataatacagcacatattctctgactgcaaaatattaaaccaattacagaagaaaatgtgggaaattcacaatgatatggagatttaaaaatacttcaaagtaaccaatgaatcaaagaacaaatcacaagagaaattagaaaatattttagatgaataaaactgaagaaacaacataccaaaattttgtggttgtagctaaagcagtgcttcaagggaaatgtataacagtatatccctaaattttaaaaaaatctcaatccaataacctaatttttcaccttaagaaatgagagtgaaagagcagacttaacccaaagtaaacagaaggaagaaataataaagattagcatggagataagtagtgaaaataaaaacaatagagaaaattaataaacttgaaagttggttcttctgatatatcagtaaaattgacgtattattagtttgaccgagaaagaacaaaagagagaagattcaagttactagacataaatgaaagtatagatatcaccttacagaaattaaaagaattctaacagaatattgtgaaaaagtgaatgtcaaaaaattaaattatatgagatacacaaatccctctaaaggcacaaactaccacagctggtgtaaaaacatgaatacaccatttacagttaaaaagactgaatagataaaaattttaagaagaaattgagtaagtaatttaattttcaaactataatcccaagaccagatgttttcattggtgaattctaccaaactttaaaaggattaatatctatttttcatacactctttccagaaaatagaaaaggagggaacactctataactcactgtatgaggtccgtattacccttatatcaagaccaaacatcataagaaaagaagactaaagacttatggtttctgctctgatatgtttggaagtcatcactactattgtcacaaggaaaaatctgaacaaactaaagtcaacgatttcttaaactaaccatagaattgaggtaacgggcgaaaactggagatgtaggcaaatacaaaaaaaatcacagtttatcaggagcagaaactgctgaaaccagcaactcgtatgaacatgttaagtggtaattgacaaatttctggagattgaatgtggactggattgagagttaggaactcctaagtgcccagtttttgatgaccccacacacttttgtaaactagacttccaagagccccagcaagtttcttacagtgaagactgcagaaaaatcccctgatgcttcagataggaggaagggaaaagcaactattttgaaataagcccaggggacaagtagttatttctaaacactctcagagcattttctttcacacggcagggggctccctgcaagggaagctactttgcctgagccttgtctgatgtaggagaaaaggaattggatggctcaagctccatctagcctttctgatttatataagggaagcaaaaaataggttaagaaactcttctgaaagtcacaactcagatttattttatatttatttatttatttatattttttgagacggagtctcgctctgttgcccaggctggagtgcagtggcgcgatctcggctcactgcaagctccacctcccgggttcacgccattcttctgcctcagcctcctgagtagctgggactacaggcgcccagctaattttttgtatttttagtagagacggggtttcaccacgttagccaggatggtctcgatctcctgacctcgtgatccacctgcctctgcctcccaaagtgctgggattacaggcgtgagccaccgcacctggcctcacaactcagatttaaccataagattatagaacacttctcctcccaaaacagagatatagatcaatggaacagaacagagccctcagaaataacgccgcatatctacaactatctgatctttgacaaacccgagaaaaacaagcaatggggaaaggattccctatttaataaatggtgctgggaaaactggctagccatatgtaaaaagctgaaactggatcccttccttacaccttacacaaaaattaattcaagatggattaaagacttaaacgttaggcctaaaaccataaaaaccctagaagaaaacctaggcattaccattcaggacataggcatgggcaaggacttcatgtctaaaacaccaaaagcaatggcaacaaaagacaaaattgacaaacgggatctcattaaactaaagagcttctgcacagcaaaagaaactaccatcagagtgaacaggcaacctacaaaattttcacaacctactcatctgacaaagggctaatatccagaatctacaatgaactcagacaaatttacaagaaaaaaacaaacaacctcatcaaaaagtgggcaaaggatataagcagacacttctcaaaagaagacatttatgcagccaacagacacatgaaaaaatgctcatcatcactggccgtcagagaaatgcaaatcaaaaccacaatgagataccatctcacaccagttagaatggcgatcattaaaaagtcaggaaacaacaggtgctggagaggatgtggagaaataggaacacttttacactgttggtgggactgtaaactagttcaaccattgtggaagtcagtgtggcgattcctcagggatctagaactagaaataccatttgacccagccatcccattgctatatatatatatatatacccaaaggactataaatcatgctgctataaagacatatgcacaggtatgtttattgcagcactattcacaatagcaaagacttggaaccaacccaaatgtccaacaatgatagactggattaagaaaatgtggcacatatacaccatggaatactatgcagccataaaaaagatgagttcatgtcttttgtagggacatggatgaaattggaaatcatcattctcagtaaactatcgcaaggacaaaaaaccaaacactgcatgttctcactcatagatgggaattgaacaatgagaacacatggacacaggaaggggaacatcacactctggggactgttgtggggtcgggggaggggggagggatagcattaggagatatacctaatggtaaatgacgagttaatgggtgtagcacaccagcatggcacatgtatacatatgtaacaaacctgcacattgtgcacatgtaccctaaaacttaaagtataataataataaaaaaaggctacctaaaaaaaaaaaaaagaacacttctcctcccaacaccatatcaccacatcaaccaggactccagtgtaatagcagtgaattctaactgaaagaggtgaaagacactgattgtatttaagaaagatcttctaaggaaatccaaaaatagtaggggagatcaaaacaaagatactagaggaaattgaatatgtgacacctatagctacaaaaaaattaaacataacatagccctaaccatataaacataaaacctcacacaaagacctattatctgagattctgttgcctgatacattgcgttttatttcaataaaaaaattagagggtatgttaaaaagcaggaaaagttagtctaaagagacaaattgagcctcagaagtaggctcagatatggcagagatttggcaattatacctagagtttaatataaatgattaatataataagtgttctaacagaaaaaggcaacatgcaagaacggatgggtaatgtgatcagcaagaaggaaactctaagaaagaagtcaaaaggaaatgctaggaataaaaacctacaagaaataaagaatgcctgtgatgggttcctcagtagactggacaaggtcaaagaatcagtggatttgaaaatatgtcaacaaaaactgccccactgaaatacaaaagaaaaatagaattttaaaaacgtaacacaatctccaaaacagtgggacaattacaaaagatgtaatgtgcctaatgcaaatgacagtaggagtataaagggagaaaggaatagaaaatctgaagtaataatggcagagagttttccaaaattaatgctaaaccacagatacagcaagcccagagaacaacaaggaggaaatttagtaaagcgtctgcaaccaagtatgtcatattcagactgacaaaaccaaaggtgaagagaaaatattgaaagaagacaaagaggaaaataaatatcaagaaaatacatacgaaatacatcatacatacataagaaatacatcagaccatacaagcaagaagagaatggagtgaaatgtttaaaatgttgaaaaaaaaactatcaatttgcaattctgtatccagtgagattatctttcaaaagtgaagagggaaatggcagagaagtcatctccaagacctatggtttcccttcacagaaacactgaaaaatatgaacaaaagtggtcagaattaactttctaagaattctataaaatggtaaaatgtttacaccagtaaagcaaatgctgaattgagaaggcaacttaaaaaggtgaagaaaacttcgtattatttttatgtgtccttgccccacgtccttccctaccttagtcttgaagatggcagcccacatttctactgtggggctctggtttctgtttcctggttcaagagggagaataacagaccttacttttagtcattattatttccttctttctgatttccttgggtttattttgctcttctttctactttattgaaatgagaactaagattatgatttgagacatttttctaatgtaagcatttagtgctataaatttccatctcaacactgctttagtcacatcccacaaatttttatatgttgtaatttcactttcatttagttctatttttaaattttttctttttatacttcctctgactcacagattacttagaattgtgttgttcagttttcaaggatattgtagattttcctgtttctctgttgtctaatagttctgttccattttgtacagatagctcacgctgtatgatttcaattttttaaaaaattgtgctttgttttatggcccagatatggtctgtgctgtgaatattccatgttattataaagtatgcctgttatattattatatatatataatatatataattataaagcatgcccgttttgtattgttagcagagtattctagaaatgtcaatgagatcttgttggttgatggtgcttttcagttctatatctttgctaattttttttttttttgcttagtagctatatgagattctgagagaggaaattgaagtctccaaccataattgtggatttgtctatttctcctatcagttctatcagtttgtgcatcacatatttgaggctctgttgtttggtgcatacacaagtggaatcattgtgccctcttggtggcttattttatgattatatagtgcctatctttgtggtatttttatttgctcttaaatctactttgtgttatattcatatacccattcttttttaaaaaaaattgtttgcgtgatacatcttttccattcttttaatctcagcctatctgtgccattgaatttgaagtgagttttcatatagagaacatattattgaatcatcattttaaaaattccttttgccaatcttttttatactgaggtaaaattgacataaaatttatcattttaaagtgtacaatacagtggcatttggtaatacacatgttatgcaacgttaactctacctggctcctaaatgttttcatcatccccaaaaggaaacttcatactcattaagcagttaattcccattccttctctcggccactggcatccgcaaacctacttttctgtctctatgaatttacctattatggatattttgtataaattgaattatacaataagtgacctttatgtttggcttcgttcgcttcgcatactatttttcgatattcaaccatgttgtagtatgtatcagttttatttgaataactcaattctttttgttgtatagctaaaagttgattcctaggtcataatgataattctatgtttagtttattgaatagctgccaaagtttttccacagtggctctgtcattttaaaatcccactagcaatggatgagagttccaatatctccacatccttaccaatattgttattttatatttttataattataattttcctagtgaatacgcaatggtatctcattgtgtttttggtttgcctttccctaatgactaatgatgttgagcatcttacaatgtacttgttaactatttgtgttctttagagaaatgtctattcaagtgccttgtccattttaaaaatcgagttgtcttgttgacttatgagttctttaatacagtaaacgcttatcagatatgatttataagtattttaacccattctgaaggtcaccttttcacttttgtggtagaccattatgcacaaaggttttaattttgataaatccaatttatccgcttttgttgttgtttttgttgttcgtgcttttgcaaaacctagtgtcatgaggttttctcattatctttggagaattttatagtttgggtctatacatgtagattattgatctaatttccattaatttgtgtgtatgctacgaggtaggggtccaaattcaatttttgcattgaattgaaaattcatattttcagtttcaaatttcaactgcatattcagttgttgcagcacaatttgttgaagagatcattctttaccacagggaatgatctgggacccttgtcaaaaatcaattgatcatagatgtatgggattatttcagactttagatcttgttccatgaatatgcctatttttatgccagcactgcagtattttcattactgtagctttatcataaattttgaaatcaggaagtatgtatcctccaagtgtgattttcatttgctagagtgttttgactatttggggtctttgcaattccatatgaatttcagaattggcttttcatttaaaaaaatggtagttgagattttcataggaattatattgaatctacagatcactttgggtagtattgccatcttaacaatattgtattccaatccataaacacggatgtattgccattcatatctttttttcttttctttcggcaacatttagtatatgacacttgtaactccttggttaaatttatacctaagcattttatcctttctgatgctgtttaaatggaattattttattaatttctcttttagatggcttgttgcaggtgtatagaaatagaactgattattgtgcttttattgaattatctgaaactttgctgcatttattaactctagtaggttttttttttctttaaagttgtctatatatcttgctctgtgaatagataattttacttcttgatctccaatatggatgcctttctttctttttcttacctaattgctgtagctagaattttcagtataatgtatgatagaagttgttcacaactatccttgtcttctttctgatcctaggggtatagctttcagtctttcaccattaagcacaatgttagctgtggggttttcttagatgccatttaatatattaaggaagtgctctgctatttctaattggttgagtatttttattataaaatggtgttagattttatgactttatgtactgcataattgagattatcatgtggtcttttcattcgattaatgtggtatattttatgattttcatatgttgatccacctttatattcttggggcaaatcccactgtgtacacgggttttttagggtctcctaattttcttcattctttttcttttctctccctgagactgaataacgttaactgacctatcttcaagtttactattttttcttctgctgttcaaatctgcttgaacctatagagtgaatttttcattttacttattgaacttttcagctccaaaatttctctttggctactttgtataatatctatctctctatagatattctctatttggaaagacatttttctcctggttttctttacttatttgtattttttaaagtctttaagcatatttgagacagttgatttaagtatttgtgtactaagtccattgcctaagcttttgcatagagattttatattaatttcttttttttctgtgaacaggtcttttttttttttttttttttttttttttttttagaaaactggacattttgagtagtataaacgtggctattttagaaataattttcctccctccttaggttttgtttccacttgttgcatgttgctgttgtttgctcattagtgacttttctaaagtattttgaaaagtctgtgttcttgatcatgtgggtccattgaattctgtattctgttaatttcatagtcagctagtgttctgaaagttcccttaagtgcatagagccaataaaagaaaaagaaaagaaacacagaaaaagaaaagaggaaaaaaggagggaaagagatttaaaaaaataatgtcggttgggcatggtggctcatgcctgtaatcccagcacttttgggaggccgaggcaggcaaatcacttaaggttgaccatcctggccaacacggagaaaccttgtctctactgaaaatataaaattagccgggcatggtggcacatgcctgtaatcccagctactcgggaggctgagaggtaggagaatcacttgaactcgggaggtggaggttgcagtgaactgagatcacaccactgcactccagcctgggcaacaagaatgaaactccatctcaaaaaaaaataataataataatgcctttgccgatttgctctgtgtttgggccctcattcaatgcctagtcaggccatttacaactctctcttaactttcactacctgcttgtgtactgactgaaggccacctataggtgaaagcttaacatcatctcagatctttttggaccatgaatcctaccctgggtatgcacatgatcttcttaatttcccagtagatgcaagagttttagtgttttaaaagtccttattccctcatctatcttcttttctgacctttttcagtctgcttattgttcatctgaactgacatcctttgccccaagcggctgtggcaaaaacttttacctttaaatgctttcaccacaagccacttgggaagctgccccagacctgggactgctctgaccctgatgaaacaaagacaagaccttgtacagccaggcagccataagacaagtccatacccaaaccacagttctttcagaataaggtctatattggattctctggccctagtaaccagcatgagtctgggcttgccatcttcatggccacttgtcttagtttgctagggctgccataacaaaatatgagagactgagtggcttaaacaagagaaatttattttttcacaattctgaagaccagaagtccattactctgaaatctctctccttggcttgcagatactgccttcttgccgtgtcctcacacagccttttctctgtgtacacatccctggtgttttttaagcctgtccaaattttctgttcttctgaggacaccaatcagattggattagcgaccacccatatgatcattttaccttaagtacctcttcaaaggtatcagagtagtatatttgctacagttgatgaacctgcatacaacatcatcacttgaggtctgcagtttacattagagttcatcgttagtgttatatattctagggtttgttttgttttgagacagaacagagtcttgctgtgttacccaggctggagcgcagtggtacaatctcattgctacctctgcttcccagattcaagcaattctcatacctcagcctcctaagtagctggaactacaggcgcacaccaccatgcccagctaattttcgtatttttagtggagatggggtttcaccatgttggccaggcaggtcttgaactccttgcctcaagtgatctgcccgcctcagcctcccccagtgttgggataacaggcatgagtcaccatgcctggccttattctatgggttttgaaatgtataatgacatgtatccatcgttgtagtattagatagaatagcttcattaccctaaaagtcttctttgcactgggttgagttttaaaagctctttgattattttatgacagttccttattagatatatcttttgcaagtatttttatcagtctgtggttatcttgtcttttacagagcagtaatttttaattttaataaaatccaatttgtcaattacttatctcatatgactctggtgttacatctaaaatgttaccaccatactcaaggtcacctaggttttctctaggaattttatggttttgcattttacatttggtgtatgacccatttgaagttaatttttgtgaggttgtaaggtctgtgcctagattcattttttttttttttggcatgttacttcagtattcataagaaacattgttctgtaatcttctttcttatagtatcttagtcttgctttagtttttgggcaatgctggcctcactgaataaattcaaagtgttccctcctcttcaattatttggaaaagtttgagaaagactattgttaactgttttctaaatttttggtggaatttaccagtgaaccaactggtcctaggcttttctccagtaggtggttttgattatgctttcaatctctttacaagttacacatctatacagacttttataattcagtcttggtaggttgtgcgtatttaggaatctgaccacttcatctaagttatccaattagttggcatgcaattattcgtagttctctgaataatcatttttatttccacaaaattggtaatatcccagtttccattttttatttcattgaatcttcttttttcttagctaatctagctaaatgtttgccaattttgttgatcttttggaagaaccaacttttgatttattaattttctctactctttttctgttctttatattatttatttccacactaatctttactattttcttccttctgttggcctttaattttttttttttaatttttaaggtgtaaatttaggttgagaaattttttaaatgaaagcatttagagctataaattttccttctggtgttcctttcactacctgccataaattttgatatgttgagtttttgtttgtcttggagtattttctaatttgtcttctaatttcttccttgacctattggttatttaaatgtatttaatttttgcatattgtggatttcccagttttccttctgttattgatttctagttttattccattgtgatcacagaagatattttgtataatcgcagtctattaacatttattaagtcttgtggcctaacagaggatctatgttggagaatgttccaagtgcaattgagaatactattctggtgctattaggtgaagtattctctatatgtctgttaagtccaattcatctatagtgttgacgtttcctgttccttactgattttctgacttattattctatccattattaaaagtggagtggtaaagtctctattattgtagaactctctgtttttcaagtctatcaatatctgtttcatatattttggagctctgtttgctgcatatgtgtttacaattgttatatcttcttggcaaattgaccagtttcatcaacataaaatataattcttattgtcttctaacagtttatttttctttttacataaagcctattttatctgatcttagattccctcacactccaccccagcacgcttttggttacatttacataatatatcttttccatcctttcattttcaacctgtttgtgtctttagatctaaagtgaatgtcttacagacagcataagctatgtcattaaaaaaatccattctgcttatctctgccttttgactggggagtttaatccatttgcatttaaagtaatcactgatcattaaatactttcagtattttgttgttttatgtatgtcttataactcttttgctcttcatttccttcaatattgcctttgtgtttagcttatctttttgtgtcacactttgatccccttctcatttcttttttatattttctttgtggttaccaggaggacaatgtatcaacttttaaagttattacaattttatttttttaaatctctcccattcggggattttaggaaggttaaataataatgtaaatgagatacctagaacaatataagcattcaggaattattaactcaattccaatccttcctccacctccacctctttctctgtgagattatagaaaagatgacaaaaaggatgttttctgagccctttaattgttgagaatgatctttgagaaaaagaaaaaaaatgaaagcactaggaatgtacaacagcctggaagtataattaagtgtaaattaaatagataaaagttataagcagaggaaagtatagtagaactcagtatttaaaagagaatcaatgtgaaaattatataaatttatgtaaaataaaactaccagacaaatctgatatccttaggatttttctttctttcatgtgatttctaattgctacatatgacactaaaccattgatctgagctgtaagagaaactggaaattgttctgttatcttttgtaagatttctagaacattttgccctcagacttaaatgccaacgtatttctcacttattgtttactgcttttggatttacatatgatttgattctttcttatctcttatccttacaatgtaattcaaactgatgccaatttaagttcaattgcgtacaaaaactctactcctatgcagctccgccccatctaatttacattattgatgtcgcaaattccatctttgtacatagtttacatattaacatggatttatacatttttatgtatttggtttttaaatcctgtagaaaataaaaagtcaacacaccaatattaaaataatactggtttttatatttgtccatgtgcttacctttatcagtgttctttacatctttatacgggtttgagttactgtcttgtgtcctttagttccaacctaaagaactccctttagcatttttatagggcaggtctagtggtaatgaactctctgagtttttatttagggatgtcttaatttctagctcctgtttgaagtaaatttttctggatatacaattctctgttgattgatttttgttcattttcccttcagctcttttaaatacattatcccactttcttctgccttccaaggtttctattaacaaaattcagcttataatcttattaaagatctcatgtacatgagtggcttctctcttgctgttttcaagattctgtgactttggtttctgatagtttaaatataatgtgtcttattgtgggtctctttggatttatcctagagtttcttggtcttcttacgttggtatatccatgtatttcaagacatttgagtagttttcagccattatttcttcaaacaatctctcctctttggggacttccattttacctatattggttcttttgatggtgtggcaccagtcccctagactttgttcacttttttccagtcttttatttctgcttctcagactcaacagcttcaagtgttctgtattcaagtctgctgactctttcttcttccagctcaaatctgctgttggatccccccttgtaaaatttttaattccattttagtgtttttcaagttaagtatttttattaggttcctttttataatttctttttgttgatattctcattttattacacataatttgtctgatttccattagtttttttctttgttttcctttagctctttgaaaatatttaagacattttaaaagtctttatccaagttcaatttctatggttctgtagagatattttctgccagtttatgttcttcttttccatgggccatgttttcctgtttctttgtatactttctaatttttggttgaaaactgagcatttgaaaatagagccaactttcccagtttctgcagagagtctttatgccacagtattcgttcactgattaactgggtatatctaagcttagggagcagctgagtcaaaagtttaaggtcttctcaggtcttttctgagtatacatgtttcctatgcctgtgtgaaatgttctcaatttccctatataaacagctacttcttcttttttttttttttttgagatggagtctcgctctgtcacccaggctggagtgcagtcatctcagctcactgcatcctccacctcccaggttcaaacaattctcctatacaggtgtgtgccaccacgtctggccaatttttgtatttttagtagagacagggtttcgccgtgttggccaggctggtctcaatctcctgacctcaggaggattacaggcttgagccacagtgtccagcctaaacagctacttttgaatgctttaatttcctgaatagtctcaacccagtttttccttgaggtcttaggtggtccattgtatgtctccacccatagttgcttgccccaggcatctgtgggtctgtggtaccactgcagctttcaccacctgtagctgccacctttccctatctgagatccaggttaggtgagagagatcattccttcacgcagtcccatgacaggttggaacatttcaaataaggtctgttctgctcctctggttgaagggagaaaattgggaaccggtttcccaccttctacaaaccaagatctcatgttgccacgggagtggcagggcaagtgcaagtgaaaatgccatacaattttctaccattttgaacgcgggtttttcttcaatggtcatttgcttggttgctgtaggcctttcactgttttccagagctcccataagattactttagccagttttttgttctttcctgatgcttccctggcagagtaagggttggaacttccaccattttgctgattcataactctgtagtcagttttaaatatattgatacttgagtttgttttatggcccagaatatggtcttggtaaatgtttcacatatactcagaaagaatgtgtattctgatgttgttacatgggctgttctataaatgttacttaaggtggttaataatgttgctcaagtcttctatattcttgctgattttcttttatttatttattttattttttttattatacttttaagttctagggtacatgtgcacaacatgcaggtttgttatatatgtatacatgtgccatgttggtgtgctgcatccattaactcatcatttacattaggtatatctcctaatgctgtccctccctgctccccccaccccatgacaggccccagtgtgtgatgttcccctttcctgtgtccaagcgttctcattgttcaattcccacctatgagtgagaacttgcggtgtttgtttttttgtccttgtgatagtttgctgagaatgatggtttccagcttcatccatgtccctacaaaggacgtgaactcatccttttttatgactgcatagtattccatggtgtatatgtgctacattttcttaatccagtctatcattgatggacatttgggttggttccaagtctttgctattgtgaacagtgctgcaatgaacatacgtgtgcatgtgtctttatagcagcatgatttataatcctttgagtatatactcagtaatgggatgggtgggtcaaatggtatttctagttctagatcttgaggaatcaccacactgtcttccacaatggttgaactagtttacagtcccaccaacagtgtaaaagtgttcctatttcttcacatcctctccagcacctgttgtttcctgactttttaatgatcgccattctaactggtgtgagatgggatctcattgtggttttgatctgcatttttctgatggccagtgatgatgagcattttttcatgtgtctttggctgcataaatgtcttcttttgagaagtgtctgttcatatcctttgcccactttttgatggggttgttttgttcttgtatatttgtttgagttctttgtagattctggatattagccctttgtcagatgaggagattgcaaaaattttctcccattctgtaggttggctgttcactctgatggtagtttcttttgctgtgcagaagctctttagtttaatgagaccccatttgtcaattttggcttttgttgccattgcttttggtgttttagacatgaagtcctcgcccatgcctatgtcctgaatggtattgcctaggttttcttctagggttttttatggttttaggtctaacatttaagtctttaatccatcttgaattaatttttgtataaggtgtaaggaagggatccagtttcagctttttacatatggctagccagttttcccagcaccatttattaaatagggaatcctttccccatttcttgtttttgtcaggtttgtcaaagatcagatggttgtagatgtgtggtattatttctgagggctctgttctgttccattggtttatatctgttttggtaccagtaccatgctgttttggttactgtagcctcgtagtatagtttgaagtcaggtagtatgatgcctccagatttgtccttttggcttaggattgtcttggcaatacaggctcttttttggttccatatgaattttaaagtagttttttccaattctgtgaaggaagtcattggtaacttaatggggatggcattgaatctataaattaccttgggcagtatggccattttcacgatactgattcttcctatccatgagcacggaatgttcttccatttgtttgtgtcctcttctatttcgttgagcagtggtttgtatttctgcttgaagaggtccttcacgtcccttgtaagttggattcctaggtattttgttctctttgacgcaactgtgaatgggagttcactcatgatttggctctctgttagtctgttactggtgtataagaatgcttgtgatttttgcacattgattttgtatcctgagactttgctgaagttgcttatcagcttaaggagattttgggctgagacgatggggttttctaaatatacaatcatgtcatctgcaaacagggacaatttgacttcctcttttcctaattgaataccctttatttctttctcctgcctgattgccctggccagaacttccaacactatgttgaataggagcggtgagagagggcattcctgtcttgtgccagttttcaaagggaatgcttccagtttttgcccattcagtatgacattggctgtgggtttgtcataaatagctcttattattttgagatatgtcccatcaatacctaatttattgagagtttttagcatgaagggctgctgaattttgtcgaaggccttttctgcatctattgagataaacatatggtttttgtctttggttctgtttatatgatggattatgtttattgatttgtgtatgttgaaccagccttgcaacccagggatgaagcccacttgatcatggtggataagctttttgatgtgctgctggattcagtttgccagtattttactgaggatttttgcatcaatgttcatcagggaaattggtctaaaattctctttttttgttgtgtctctgccaggctttggtatcaggatgatgctggcctcataaaatgagttagggaggattctctctttttcctatttactgtacatttattccaccagtgactaaaacaggtgtatcaataaaatctgttccctcaggttttgcttcaggtattttgagggtctgttatcaggtgcataaacaagattgttatgtcctattcttaaattaatctccttataattatgaagttaattttttttttcttgagatgcagttttgctctgtcgcccaggctggagtgcagtggcacaatctcggctcagtgcaacctctgcctcctgggttcaagcatttctttgcctcagcctcccgagtagctggggttacaggtacctgccaccacgcccggctaatttttttgtatttttagtagagatggggtttcaccatcttggccaagctggtcttgaactcctgaactcttgatccacccaccttggcctcccaaggtgctgggattacaggtgtgagccactgcgcctggacctggcccgaagtaaacttctttacccttgctaatgatctttgctctgaagcatgctttgctggtattaatatagtcattccttctttctttgattcatgtttgcagggtatatctgtttccattcttttacttttaacctattgtctttatatttaaagtgcatttcttgtaagtataattggtttcttaaaatccaattatctgccttttaaatgtcatttttatatgatttgcataaatatgattattattacagctaaattgaaatctgtcatcttgctatttggtttctatttatcccatttttttcccctctttttttgctttccttgagattgaacattgtattagttttctagggttgctgtaagaaagtgacataaagtggatggcttaaaacaacagaaatttattgtttcagtttggaggctagtcatctgaaaccaaggtgtcatcagggccgtattctctctgaaacctgtagggaagaattctttcctgcctgttctagcttctagcattttccagcaattcttggcattcctttgcttgtagatgtatccctccaatctctgcctctatcataacatagccatcttctccctttatctgtctattcttctcatcttataagaacattaattactgaattggggcccagcatagattaggcctaatctcatcttgaataggttacatctgccaaagattcttcttccaaataagatcacttttacagcttttacaggtactgagagttagaacctcaatatatcctttggtggggaccgacctcttacccataaaaagtattttatatgattccattttatctcctttttaggttattaactacaatttttttttcttttttttgagatggagttttgctcttgtagcccaggctggagcgcgattttggctcactgaaacctctgcctcccgggttcaagtgattgtcctgcctcagcctcctgagtagctgggattacaggcatgtgccaccgtgcctggccaatttttgtatttttagtagaaacagggtttcaccatgttggctagggtgggtctcaaattcctgaccttaggtgatccacccacctcggcctcccaaagtgctgggattacaggcgagagccaccacgcctggctttataatttttttttaattcagtggatgttttagggtttatagtatacatctttatcacagtctagctccaagtgatatatccctttatgtatagtacatgacccttacagtagtgcatttccatttttcctctctggcatttaggctattgcacacacatacactcaattcatccctttgtgtagatccgtatttccagctgctatcttttgcttctgtctgaaatatatgtatgatttcttttatgactattttgagaaatttggttatgtgcatttgtctatttttcttatgtacttttagctcatcaatcttaagtctgtgagtttatagtttttaaaaacaaatttgaaattatttggctattatttcctcaaatatttttttctgccgcccctgctttccctttccttagggatctctgatttccacctatattactctgattgaagttgttccacgtctcttttgaaaatctctgaaaaatcttttatcatttggataatctgtatttgtacatcttcaagtacattaatattttcttttgcaatgtttaatctgctgttaatcccatgtagtggattcttcatctcaggtattgctgttttaatctctagaaattccattgaagtcttacttgatgaaaaaggcagataaaaacaaatgttggcaaagatatggagaaatcagaatctgcacacactgatgatgggaatgtaaaatggtcaaggcaatttggaaagcagtctggcagtttctcaaaaggctaaacgtagttcccatatgacagcaatcattcatctaggtatatactccagagaaataaaaacatatccacaccagaacttgaacattaattttcatagcaacattattcctaggggtttaaaattttttacattatttttatttaaaatagagacagggtctcactacgttgcataggctggtctggaactcctggaattaagcattcctcctgcctttgtcctgttttctccactggaaaagaataaaactttgtacacttggactaacaactcccgattccctcctttaccaacatgccccacagcctctagtaacttactctctactttcatgaattcaacttttttaagattccacatataagtgagatcatacaatatttgtctttctgtgcctggcttatttctcttagcataatgtcctccagattcatacatgttgtcttaaatgacaggatttaccttcctttaaaggctgactagtacttcattgtgtatatgtatcacattttctttatccacttatctgttgatgggcacttaaattgtttcaatgtcttggctactgtaagtaatgcttcaataaacatgggaatgaagatatcccttcaacatattgatttctgttcttttggataatactcagaagtgagattactggatcatatggttgttctatttttttcagaaacctccatactgtttttcatagcggctgtactaatttacattcccactaacaatgcatgagttcacttttctggacatcctccccaacacttgttatctttcatctttttcataaaagccattatataataggtgtgaagtgacatctcactgtggttttgatttgcattactctaataattagtgtgagcattttttttttttcatgtaccgaatgtcttttgagaaaggtctcttcattcctttgcccattttaaaatcaggtggttttcttgctcttgagttgtttgagttccttatgtattttagatatttacccatttccagatatatcatttatattttttcctattctttgagttccctcttcactgtgttgtttccattgctgtgcaggtcttttattttgatgccaccccatttgtctatttttgccatgcttttgcagtcatatccaaaaaaatcattcccaagaccaatgctgtggagatttccccctatgttttcttcagtaggtgtacagttttaggtcttatatgttaagttttaaatctatttttttatatggtgtaaataagggtctaatttaattcttttgcatgtggatatccagttttcccaacaccatttattgaagaccctgtccttttatacttttcagtatgcagatcttttacctccttaaatttacacctcagtatttaatatttgttgctattatgagattttcataatttccttttcagatagctcattaatagtagatggaaacactactgatttctgtaagatgattttgtattacggaactttactgagtttgtgtatcagttctaccaggttttagttttgttctggtggagacattacagttttttgtatatggttatgtcatcagtaattacagatgatttaacctattcctttcctattaggatgccttttttttctttctcttgtccaactgctctggttaggacttctagtactatgtcaaaaagtgatgagggtcgtacatggcctccatacctaatctgttgagagtttttaccatgaaaccaggttgaattttgtcaaatgctttttctgcatccattgagatgatcatatgatttgatttacaccctccattttgttatgtggtatatcacactttttgatgtgcatatgttgaaccacccttgcatcctaaggataaatcccacttcatcatggtgaatcattctttgtattcgtgaatccagtttgctaatatattgttgaggatttttgcatccatgttcatcagggatattactttgtaagtttctgtccttaaagtgtctttctctggctttaataacagtgtaacactacccttgtaaaatgaatttagaagtattccctctgcttcattgttttggaaaagtttgagaatttttattagttctttaaatgtctggtaaaattcagtagtgaagctgcctaatcctgggctttcctttggtgggatactttttattactggctcaatctcttttcttgttattggcttattcagatttgtttcttcatgattcactctttgtaggttgtatatgtctaggaatttattcatttctttaggtcatccaatttgatggtgcataacttcatagtagtttcttataatcctttgtattttggtgatatcagtagtaaatgtctcctctttcatttctgatcttatttgagtactctttttttctcctagtctaggtaagaatttgttgattttatctttcaaaaaaaaaaaaaaccaactcttagcaactcttagttttgttcatttttttccagtctttatttcaactgtgatctttgttacttacttctttatgctaactttcgggcttagtctgttcttttcctagttcctttaggtgaaaagtgagattgtgatccttcttctttattggcgtaggtttgtatcgctataaatttccattaggactgattttgctgcatcacataagttttgtttccattttcatttgtctcaaggtaattttttatttactttttgacttcttctgtgaactattagttgtttgggagcatattgtttaatttccacatattgctgtattttccaccagaattgattcttgttcttgatttctagtttcacgccattgtaatcagaaaagggatttgatatgatttctgtccacttaaacttaagattagttttgtggactaacatatatcctggagaatgttccatgggcatttgagaacaaaatgtattttgctgcttctggatggaatgtttcatatatgcctgttaagtccgtttggtctaaagtgtaattgaaatccattgtttctttattgattttctgtctaggtgatcaatctgcccatggtgaaaagtagagtattgaggtcccgtattatagtattgcagcctatctccctcttcacatcatttaaaaattgctttatgtatttaggtgggtcaatgttgggtgcatatacttttacaattgttatgtcttcttggtgaattaatccctttatcattatataacaaacttctttctttttatagtattgacttaaagtctattttgtctgatagaagtatagctacccctgctctcaatttccatttatatagaatatctttttccatcccttcactttcagtctatgtgtatgtttagtagaaaagtgaatctcttgccgggcgcagtggctcactcctgtaatcccagcactttgggaggccaaggcggcgggatcaccagaggttgggagttagagaccagcctgaccaacatggagaaaacctgtctctattaaaaatacaaaattagccaggcgtggttgtgggcccttgtaatcccagctactcgagaggctgaggcaggagaattgcttaaacccgggaggtggaggttgcggtgagctgagatcatgccattgcactccagccttgacaatagcaaaactccgtctcaaaaaaagaaaaagaaaaagaaaaaaaagtgagtctcttataggcagtatgtggttgtgacttaaaaaaaaaaaaaaatccattctgtcattctatgtctttttgttggagaatctaatccgtttacattcaaggtaactattggtaagaaactgctagtgtcattttgtaatttgttttctgattgttttgtaggtcccttgtttcttttttccctattgctaccttcctttgtggtttggtggttttctgtggtggtgtgctttgaatcctttcttttatagtatatgcgattaccattgtatttgctgtaaggctaacttaaaacattttatccttaggctactttaagcgataaaaacttgcctttagttgcatacaaaaactctacgctttcacaacccccccgcctttcgtgattttgatgtcaaagtttacacttttttaaatttgtatctcttattgtagctacagttacaattacttcttgtagctacaacttattgtagctacagttgtttttaatagtttcatcttttaaacctcctaataggaataacattgctttacctgccacctttacaatactagagaattctgactatgaattacttataccatttagttttttacttttatgtttctcattaactagcagtcttttatttaagcctaaagaactcccttttagtaattccagtagagcaggcctagtagtgacaaactcccttaggcattgtttatctggaaaagtgtttatttctccctttgccaagtaaagtattcttaattaacagctttgtttccttcagcactttgaatataccatcccactctctactggcctgtaaggcttttgctgataaagccactgaatctgtattggggctaccttgaatgtgatgtttcttatctttgctgctttcagtattctttgtctttgatttttgataacttggttgtgatgtgtcttggtgaactctttaggttgaatctgatcggtgacctcagcttcctgttcctgaattttgtcatcttttctcagatttgggaatttttcagctattacttccttaaatatgctttctaggcctttttctttcttttctccttaaggacctcctattatgcaaaagttagctagcttgatgtgtcctgtaattcttataggcattcttttttgtttttgtttctcattggataatttcaaatgtcttacctttgagctcattgattcttctgcttgatcaagtctgctgttgaagcgttctacttagattttcagttcagttactgtattctttatctttagaatttctattgtttttgtttatatttgttaaacttctcattctgttcagatgttgttttccaaatttcatttttctatccatattttcttgtactttgttgaacttaagaggattagtctaaattatttgtcatttcacaggtctccatttcttctgagtctgttactggagctttcatatccaatgtacaccagaaactttgctaattccacagtaaatgttagaaatgggtttttattgataaaatcagtggcttgctaattagtatgttagaagctggcttgcattggtgaagttgagggtattcgatatacgtatcccggctaaaatacttctaaagaacctctccagctttgcaagaatagagtataggaatctgaggaggcctttaacatggccctcagaaaggacacacagggcttgacctctaaacatataaacatatacagaaacgaggtcagaacatgttttgactgatgccagtagtaacacagcagagcctattgctggtcactgttaccaataccttgtgtaataaacctttcatttaaattgagaggttgtaagccccgaaaaagcaaagggcttacagtacctcttgcctgaacactcctgtgtgtgctttctaagaaatgcttttaaaataatgcctgtggcacaaattgatttgacactggctctctttataagctgctatcaaggttgtggggaatagctaactcttacccactttccctgacaaataggaacccgtagttacctaccaaaagtatgtaaaagctatatccgacccaaaggccagttaggtcaaaacaccttgaaaggagctcagtttaaggaaatcagtggtgtcacagtgccccactagcgtgtaaaagttttcatagtttgactatcggatgtgcttagtttcacagctgagtcttaccttgtgatacttttagagcaaaagtcaaatcaaagatgatttaaaaaaacatttcaaagattcataaagaataaatgcctcctcaggaagtcttctggagttctgcccacttcccttaggtggctctttactgtgcccatctcatagcctgtctccttccacttggtgtattgcagagtaaagctcactgtttacaggggtggtagaaagtgtggtcctttcccagactcctttttcccttcctcttctcatttttcagaagatgtgtttgataataaacgaaacaaaatgactaacacattgagctgagctacataagcagatgtcagtttgacgtgaagagtttaaaagatctatgcattatctggggactcctcccccagacctgaaggatcaggtgctgccttctatgccacctgtgcagacagcaaaagaggaaaaccatacccacgttcagtatgaacaaaggggacatttgaactctgtgtggacccctcattggaagggtgtttcttctcctgctgcatccacaaagagcactccttagccttgccttttgtcagttctctctccaataaggcttgagcagagacaacccagtgcagttcagagagactgaagtctggtgttccaggtctgagtcctagctctagctctctgtgtaactttgggatgtcccaaagtaacttttcacaacttgataggtgttaacttgaattttggatacaggtgactcttagcccatcccctctctgtgcttcagatatgtcatcacttgggccatatgacctctggacacctttcctactttccacaatttcagagcagcagagcagactggagctcctgctgcctctgagcttcagtgaattatcactcgttggagggaagcttcaagcattttgttatctttcaagagcaaacacagtgtctgtcagcaagaatatgtagcagatgctagtgaacagcagtgattagggttgaatgctggatttaaatatggagcttaggctgtgaaggaagcctgaagaacctagagccccatgaagctgccctctgtgagatctgacaccatttcccactgatgagccatgggtctaatgggtagcactgattccacatacagtatgtgagtgcaatacagtgaaagcaaagagaataaaatgatggctaacatgatgttccaaactttaaacaggagaaaaacacacaattccattatgtataagaacccacacagagatcaggagaataacctcattggagaatgaatgacctgtgtggggaatttagggtagagttgagattgaaaaaatgggccgaagtcaggtggccaagggccttaataccttgtatacaagatgtgtagtcaaggaagaccatgccttacttatgcatcaattcccttgggcctacaaagagctgcctagcctgggactgttgtagagaaaagctacagtgttccaatgacacagggactcctccatgtatgtatgagtgcccagctggctctgtaataaatcttatttttatttattaacttttcttgcgcattggcttgatgcatcagttggaagtcagaggccaaacgaagtgaacactgagccaaaggaagttctcagcctttagggaggcagaattcactttaaacacaataaacaaatgaactcacattatacaggagagagtcagaagatcccagtggctggtgtcatcgggccatatttgcccgaagtgcctattccttataggaacccactcccagggttgatgggctacatccttaggaggctttatgcctatgttctcctgaccactggctcctccagggctggccttttttagtctctctgtagaggttcctgtagctggttggatataggctttcacagaagggtcagtgccttgggtctggttacaggactgttaatcttgctttgttaagagtaatgttatttccccatttccaaattctccagggagatggaatgtcaaagatagtatgactgtagcacctaaatcctgggttccagaagcagagaagagaatacactgaagctgtagaaaggcctattagtccatgtcagagattaactggatgcgaggaccatttctgggatggtgtatacagaactggagaactggatagggagtcagaaacaaagagctgaagatgatgcctttgaagtttccaacgtggataactaggtcaacagaatattactcaagaaagtattaacataggattgagatgcagtcagtagtaatggaattgaaatttcaaagtatatacctcatggatctcagggggtgttgagctgatcacctgggctaacactcctatgaccctggggaaaatcaaatgacctggtactgtagccatggtaggggtgtcatcaccttaatccaactgggacagtgctgtttgatattcatctggaacttggtgcagacccacattttgctgggtttcaccacaaccaaggcttttttgattcttttctcttttaacatcagtacatcactgcaaagttaatcctcatataataggagatgaaactaattgcttataaaaacaagatttttacaacactaaaattgttcaagcatatgggcatatttatagttgcaggcagtgtttcagatgcagactgttcttggctgcagtggttgtttacaggcagcatctgttctgattaaatatttgatgattatccccgaatgttttaaagcatagtactgggctctgctgactgtacaacaaactggcatttttgacctatagggcactgggctaggagatacagttctgagggaagtgaaagatagttaacaactgcacaactgaccctttattagttgcaataaagcaatccaaccacccaacccactgtgatggctttcctactatttaaggttggtggtgtcaaagagacaccctcctgtacagtgtgcagtgaatcaacatcatttccacaaaacctccttcctgcacaaaggaattatcatactttgttacgaagtaaaattttcctgtatcagtcacaggagttcaccagttaagatactgttagttgaagacttctggggtgacttaatgaaatagctcagccatctggtttaaaaactggattcttctatccctccacacagctgtccatgcacctgcatcatctcaaggctggtctccctggtggtagaaaggctgacagtaaaaactggagccacatgattccttgcttaggcagtgtttcttcatactctcacatgagagcaggcatgttctttccctaggctcacagtaaacactctgtcaaatctcacaggcccaaagtgcttttggttatccccattccaagccaatctgtggcatggaagatagcattaccctgactgccttagactaatatacctactccacttctggggctgggaataattttgaggtcaaccatccaaactgcatgacagccattccatggaagaggtatggcctaaatctttggggcaacctgaattcatgaaaactctcttagatttatgtaactatttttagaattcacttctgtatcatttaattttactaataaaaataccacctttaccctaaatgtcagccaagcgtaaggctccgttgggacagaaggaactatcaaagctttgtgtttttatacattagcagcatttgacaaagaaataactctgaaggaaggagaataaccaggcagagtctagatgcatggaaaagaagtctttgagaaggcttcgcaggctgaaggaaagggcaggactacttcaggaatacaacgtttaagtaaaagaggttggggtctgttgatcttgaggagagatgaggatggactggaaaataggagtgagatatagtaggagaggaaaggatatggatgatgtatatactgtatgggtaaccatcagtcgaccctaagaagataatagttgttaaatggttagctatttaatgaaagaaacctgaacaagtaataatcttgagttgcaaagtggctggagtcacacaacagactaaatttctggtagaacaaatccagcagcttatgtgaaggttaccatgtctgaagctggatagaaaaggtctaacttccaaccaaagtcacagttcttgagctcggtacacagagacagactgctaacagctgatgtgtcctcagcgagagtgtcctcatttatatcctcgttctcttctgcctcctttttttgttttaaacttttgggaagtctcatcattcaatacagttctaatatatcacaataacagaggcggcccaatttctacaaattgactaattctatccctgaaaagttcatacaataaaactatacaaagcatcattttcaaccatcctatagaaaaatttccctattaaattttaactctaaatcctctatctctgttaataaccttactaaaaacttccccatcactgcctgccagggagatcaaaagaaaccaaatttaagaaacctccaacacctgtacctgactgaaaagcaaacatacagacctttcagtcctgcccctactattcagctcctatcacagagacatggtggatgtccccttgggaagcggatagctcttaggtggaagctaggcctgcaataagcaggccaggaaacatgtctcccaggccccatactcttggcagaagcacttggccaccagacagcatgtcctgtcaacctacagagttcttaaaaacaaacactgggacccagaatagtaccctgtggtcatagtgcccacagttcactaagcaccctcacaggtctttgacagaacactgactgccaggtcacctggtgggcagagaaatggaagattcccaggcccaactagcatctcagggaagaaccacaagcagagcaactttcagagctggtcggccagcgttggcacccagggaagcaagtgctattccatatttggagagaacataaaactcaaggaaacagagaagtcctactcaataccgttctcaactgaaaacaagagaacttgcaaaaaagaaacccagttttctggagtccatggagaaatatgaagccaatgctcggctaacagagcagaaagccttttataaataatgccagtcaaagctccaaaggtcagagctgatgcatgccggattgttctgacaatttcttaggtttctaggcaacaaggagctggtcaaacagctcacctccaaggacatactttataataccaccctggtagacgagagcgaggcagcagtgaaggcaatagtcaagaacaggagagggaggtaaagaacaagatgctcttcagacagtctggacaaagacagtccctacccagctctcaggagttgcctccttaagaaggtggaggcccaggcagctcccagggtgaccctaaagacagactccaaggaaaagggtgtgagggcaatggtgaatataaggaggtcccctttcagtaggcagagcaagtcagttcaggtcttatttttagagtctctgaacagtgaagagaagctttctgtggacagcattccaccaccatgggaggggaaaggtgccatgagagacttctccagtggggcatacaagcattgtgcagtgatccccaagatccagccactggcaggaaatcgaaaggcaagcttcttaaatacatagtatatggagacagaagtgtggagcactcccaaaatgaaaggccaagacccaggaacaacctccacaacctggagtatatacaaatgaacccagccctgctgactcagatccacaccatcctaaagcaggggtttctcatgaatgaaagggctaagtatttggtggagagaatgagaagtctcccactgcccacacattttttcttcagagatttcttttccaagagccccttgaataaaggaagggagggagcactgaatgccccagaaatcagaatgcatggtgcgggaagacgacaggaaatagttctcaaagagatcagaaaataaattggaagcaatttcattaccacaaagaacagacattttttctaaggcacccctcccctttccacccaattgtcattcagcaactactgaatacttaccaatgaaaaacgttacccctgacctcaaggctgctcctgagctctggtagaaaatgctttccttgtctataaaacatggcaagcaaggcaggatttaacagtaagggcacagtagcactgcaagccttcaaatggaaacctggagacaagcagtgagaacaggaagcaaaagcagggcaggtgaagctaggaccagggcatctggaactttccacacaggttggatctccatgccagacaacagttttcaaggaaaaatatctaagaggaacatgactttgggaaactttttggcagtactgcttactgtatactagagagtaaaagaatttggggaacattcaccaatttgcttcttcaggggcttgggtagggaacgtgaacaggaacctggctctaatttctgaacttttttatcagtaaaaacaatccaacaaacgaaagctagtcagtgagagaactgggagggtctgccctccttccctgagtcaagccttctggggggacctcctgacatttaattaagcaaagacaacgcccactgaaggaagctgacctgaaagtgacacgctactgtgaaatgagcatgaagtgggagcttgttacatatatgaaatggccagcgatcctgagcaaagcgcttcagagcttgagacctaagtcttctcatctatatactgagggctggacaagatgatctgtcaagccatttttatccctaatccaccaaaatccaatgctttagtttattgtcacaaaagcaggtatcgaatggctatcctgcagtgcctccaatcaacattcagactttttccctgaggcaatataagataacagttaacatgtttttatcaattaggtggtcatgagataaatatatatgggaagtggtagtttttcacttaaatgcatataataatggtacagctctctttgaatagtatttgtttatttcttaaatatttaagttcctaaagacggtaagaataacccaaggaagtgaaatcaatgtcacaaagcacatggctaaataactgcaggtttgcagtgccatgtgtgagatcagatgacagaagggagaactacctttaggcagaggcttctcatgtcccctggagtggccatgtgctgttctacatgactacttccacttcggttatgtagaagctatttaaagcacacagatgtttgtgatgagaaaaaagccacccttaattgaataatggaaattataagcatgatttgagggtgggggtggaggtgggagtagagatgggtagaaaggagtgcaatggaaacaaaggagccttcataaaattcaagtcacttcttaggataacgtgattgatttactcaccaccttcttaggaacataaagcaaacaagtgggttttccttttactgcttttctgaaatgagctacactcaagaaagcagcacgggggttgtgctgtccctgcacagtggcaggagagtatgaggagcaggtgaatgccacaacagctccatccaagatcatttttcacatgcaggaaccattcttatactaccctttactggtaatttctgtagaaatctggaagtctggttgacaccctcctgtacagtgtgcagtgaatcaacatcatttcccttggactttgcaatcacggtggcattcatacattcattcaacaagtatgtatgtacaggacagtggagtaaagaaaacagatagttcttactctcacgaggcttaaaatttcaggagggaactaggcagtcatgaagtaaacataaaaacacagattgtaataggcactagagaataatgaagactttggggaacacaatttaaattggaaaaatatctcagttccgttaacacatgttgaaggggaatagcattgttttgctggatttggggcctggatgcaagcatgttgggtatgcattgtagggtaatgcatttccttccatttgggcccaagtgtatatttaccacccagttgtgatgagctgggatcctcctgctcaatctcagcttgaagcacttggaggttatctgcctgctgtgggtgattattttggagcaaggtacttcatttgcctcaagaaacagatttgataccactactgtgcccttttggaacagagaagtaggcaagaccccagtgtgaggcagagtgatgggatctttagggacataattgatgatgtaactgatgatgattttggagtttatacatttccaaagtttcaaaatattttcacttggttgatttatctttatggtgatgacactacgtagatatatgcccttcttaaaagttacagtaagaggctgggagcggtggctcacgcctataatcccagcactttggaaggccgaggtgggcagatcatgaggtcaggagattgagaccattctggctaacacggtgaaactccgtctctactaaaaatacaaaaaaattagccgggcgtggtggcgggcgcctgtagtcccagctactcaggaagctgaggcaggagaatggcgtgaacccgggaggcggagcttgcagtgagctgagattccgccactgcactccagccagggcaatgagcgagactccgtctcaaaaaaaaaaaaaaaaaaaaaaaaaaagttacagtgagagttgacattgagaaaagggaggcccagccagggttatgcaaagacacagtagggaggaggatgggaagtttctgagacaccccagtaactgcatgggtccacaaagcacatgtacagtctgctctatgcactgcaggtacagccacgaataagacaaagtctctgccctcatggagcttggtgtctgtctactggagcagacaaaaacaaacctgctttttctcatttgcctctactgtgggttccgtgtataactctcaaatgctagcatttccatgcattccatccttgtccttctctcctctctgccttttccaggagaattttcctagccacaggttcagctatggtctatgtgctggagtcatacatttttatcttctgtgtacgtttttctctagacccatatttttaattgccttaggacagctctccctggatatccctcagacacaactaaaacatcattcaattgtactattaataattttcccttcaaaatccactcctcttctctatagacctaacagcaacactgtccgtccagctctcaaaacctgaaatgtgggagttgtctttgactcttatctttcccatgcatgagcactgaatcaatcagagtccctagcatgtcttggactgtggcctcccttctatcttcagattatctgcctttttagaattatggcaataacttaactgcaaagaccacatgtgcacttgtgctctttcagtttgtaataaatataaaatgaaaagtgattatgtctttgcttaacgtctgcaaaataaaagtccaaagtccttggtatggtctataaggccctcattatctgacctgcctgccttcccaatctcatcttaatcccttacagcctgacactcagacatactagactttccacctaactcactcacatacacctatcctgtatgtcaagattcggcttgaccttcatcacctacctatctgcagtatttttggatctgaattctctgcccacattgtactttcacatacttcttttacccttagtggtttgtacttatgcctggtctaactagattgtctccctgtaacagacttcttgattcaacaaagcagctctgaatcagcctgaaacctatggcacactgcaaaatggcaaacattcaataggtatttgcccagtaaatgttaatgaaaggaaaaaaattcaaacttcagttggaataggattagagacaagttaaaaaaaagtttcccatagaaatcttcctcatcgtaaatatcatcatcctaaatgtcccgagtctttccatgggtctaatttaccaaatcatgaagactctctttctcactgtgtatgtgtagtgggagaggcagagacagaacggtttttttttttttttgcaagtctgctctctggattcgtttttctggggatgaaatctcaggctatgtagcttttctggtccctttttggtaatcaacaaatcatcagtttctctaggtattaaaaagcctacacttttgaaacaccaagaggccaaactctctcttaattgaaaacataattctgcctcttactgaggtctttgggtgggaagcttaaagacagcagtgttggggcaattggtttttcttttcctccctccaccttctttcccattcaagagctgttgctgccctttctggaggggagggaattagaaaaaaagatcctgccttacccagtcactgttaattattactttgagccagggtggggaatgactttctttcctggaatacaccctgctggaaaccacagctgagattctctaagctggcagcttccaacctctcctccctcaacagcttcaacattatatggcactcagctgcagggtgcctggctccaggccggcagtccatttgtgcagggtagttttcaagatggctcatagcccatctctttcagtgaccagcgtggcctatgggaaacatacatcttgactccattattggtaggagtactctttagttaactgccacaggccagttcagacacgtcttaccctgagagccttttcagagtcaggtaccatccctgtgtcccccagcatctgaagatcacaggtgaaggtctccaagtagttcacttaaaaaatacctcagtaggtttaagaacagggaaagctcccaattcattctgtcaggagtatgactctcatccccaaactggacagatatataatatgaaaactacagaccaatattccttatgaatatagatgcaaacattctaaacaaaatactagcaaaccaaatccagcagcatagaacaaggtttatgtagcatggacaactgagattatcccaggaatgcaaagttaattcaatatacaaaagtccattaatacaacatattaataaaggacaaaacaacatgaaaatcttgatacagaagaagcatttaacaaaacccacagcccctcctttttttttttttgattaaaaaacactcagtaaactaggtttaataaaagaatttcctcaacttgaagcaaacccacagctagctaacatcatactcaatggtgaaagactgaatgctttccccttaaaatcaggaacaagaaaaagatgtctgctcttgtcacttctatccaatattgtactggaggtgctagccagcacactaaggcaagaaaatgaaataataggaatctagactggaaaggaagaagtaaaagtatttctgttcacagatgcatgatctcatatgcaaaaaatactaagtgacaaaaaaagaattttagaaaagctacaatatacaaaatcaatatacaaaaattaattttatttctaacaccagtgatgaatacaaaaataaaaattagaaaataatcatataattaaagtggcatcagtaaaatacttagaaaaaaattaaagacgtcaagacttgcacactgaaatctctaaaacatcactgaaataaagacctaagcaaatgcaaagacatcccacagtcatggaacagaaaacctaacaccattaaaatagcagttatttctcaaatttatctaccaattcaactaaatccctatcaagatcccagctgttttgcaggaattgacacaatgatcatataaaaattcatatgcaatgcaagggacccaaaacagacaaaatgattttggggaaaaaaaaaaaaaaaatggaggacttgcacatcccaaatctaaacttactaccaagctacagccatcaagacagtgcggtgctggtataacgacagacatatagggcaatggagtaagactgagaatccagaaagtcttatatttatggtcaactgttctttgacaagggtaccaggaccattcatggggaaataatagtcttttcaacaactggtgcttgggcagatggatatacagataccaatgcacttatgcaaaaaatggatgaaataggaaacttcactacattctactgcatgctcggtcattttcaatcatttaggtggcaacactgacaagataacagaaagatggaggtaataacatgtgaaaggcaaaatggtttgtttttttttttaaaaatgacagtctctatcatgaatttacttacactccaggcaaaggttattagaagaaaaaaagatgtaagaaaattccttaactgaaatgtggaaagagtatcaagaggagaccctaagacactctgtaagaatcccagtgactcctcactgttcaactaagaaatgtaccccattatgctgtgctaccacggaagcattggaggcactttgggggttgatgaagtcttcatggatgaggtactttaaatatctggtcatgaagagtatttgagaaatatgacaagtgaagatgctgggtaggaatgcagcgaggaaagtgtgtaacacaaggccaaattggaaaggtcagtgagggggcaatctgtggaggcactgaatgcagaggatattaaaattagcaagatagtgttctagcacaatgaaaaggattggaagagggagatgagagtcagggagtgaaattaggcagctgctaagaatgtccgggtgagtcagaggatcaggacctgtaagggcagtataaagaaggaaggaatgatgggagaggtttagggggaaagaagtgacaacctgtgacaattgaggaatgagagattttgatgattggggtgaaggttacatttcttaaaaagaaacaaagaatggtcggtcgatagagatgcaagatgaagaattttgtttttaggactactgactatgaggtaacaaagaaatcccagagacagaggtctgagcaaaagatatgggattggggaagaatctttgggagtgactgaggttgactagagggaactgggcaagaacaggtaaggactttaagcagaattggaggagtatccatctaaaatctgggtaaactgggatggaaaaacaagtagccagagaagcaacagcccaagctagggtgttgtcaaggttatagatgttactgattttggcaatgaggagattataaggatccttgaagactgtactttcggtgaaactaccatgcattagtagcctttcacagtgatatctaccccacacctgcatcaaaatcttgcagtgcctattaataaatgccaacccactaacggggaggggagaaaagacttgggactctgtacttgtaaaaccctctaccctccccaggcaattctttacacactaacactgttgaggtaaaaggagacaagtgagggagcaaatggaaggtgtgtttttggattatacagtggctcatggaagggtgggaggggtacagatggcccttagacactggcggaaagtcagagaaaaaaaattacagtaagcaggtaaagggatcaagactacacagggactagtcttgggacgacatttcttcctctgacagtttgtatggaattcttgagaaaaattcctcgaaggggcctgaaatctcagaatggtcatgtttttaatgggaatagggagtgatgctgccccattacaaccatctgttctaacagaatgtctgtaccgaggagggatgagtaacatcggcaagttctgttcgaagcctttttcaagtttctttttgatatgtatctatctatctatcatctccctatacaagcaagcatccccaaaagtagttgtctcaggaaaccagggttaggatgaccagctcatttgctggagctgccaaggtccagaaaagtttggctgcaggctgttttcatgttttatgtatgtttgaaatgttctataataataaaaggttaaaaaagtttacatttatttggaaaaccagttactttagtttatggttcctttttttccctccagagcttcctggagattgaggtctaattcaaagaaaaccaaaatatataatagagtacctgggcaaaaaaagtacttttataacataacatttggggtagaggaagtatccactgtagtcaaaatgtctatgttttgctcttccttattgttcagggacattccattaaatagtaatgaaaaggcagcaaaagtaagaggagtgacaacatgcccggcataattaagcaagctagagcagctattctgtgcaaccgacgattttttttctctaaaattttaagggtaggttcattctgactctgttaaaagtctacttgatgtgaacaactctatatctgataacctatttcaattaccactttaaaacttgtcatatggatacgttattacaattgtagaactttaataaataccataataataaaacttgagaactgaagagcacacatttcttcacgaatttattatataaaacgccctcagagtatttaatttctcctcactttaattacacattaagaagcacagtggatgagaagcctttaagatgactacagttgcacgaaggtccctttcatcaaggtagcgtatgtaccctaacagtgttctaaaggctggcccagaaaaaccccatgttaccttatcacaatatggaaagcattgtcttctttttccactaaattaaattatggtgaaaagtgccacagttttatttagcattatggtacataacaaacagttctgtctcaattatgaaaaaaattaattaaaataatcctgaaagacatcctttttctccccccaatgatttgaaagctgcatttttcctgccaatttcaaacaaacaaatcatcaggttgatctacagtaatcagttaaaacaatcagtcaatcaatcaatcaatcaccaaggcacaagctcagcacattagctatagcttgtagcaaaaggatatatcaatgtctcaccttagttaaaaatacataatccttttattttataatgcaataaaagaaattaacaacatcacatacacagaagactaggaaaggggaaactacttacttctggaaatcagtaatgtaaacctacttgtacttttccatagtacatgaaagtaacgtttaacatgttttgaattaattaattaaatttaatctgtggggctatacaatgtaattcttaggagtaatagtttcattcatttccaggtcagcttactgtatgattaagtaacacaaggcacagtagccatctttttcattatgttgcaacactgatcacgtgcctcgataaaatggctgattcaacaagatgatggcaacacgaaggggagactttggattgtctatttaaaatctaggtaataagtaagtaattaataaaaactctatcttaagtgcactttcacatgctttttgtttataataaacaaacaacaaacttcctaactttgttgcaataggcttgactaccatttcatttggccaaatgcactttccccagtaaacttaaaacaacaacgagaacaacaagaacaaaaatccctgtcctttcatatactaagaaagaggattggctactgaaacagttcattgcaagacacatgaagacgacatactgtggcatgagttgtttttgtttttaatttgttgtgctgttactaaagttctgagggctgcagttaaaacattccaatttctcccttccttccatctttctttattgattgattctcaagattttgcacagaaaactctttgggggctagaacagcagtaattgcatcacactgttttcaagacttcaagtttcaaaagcaaatcattaaaaaaaatacagttcctgatttgagttagatacagggacaaaaaagtagcacatacttgaaggttacgtggtctacaaatggtggcaatattttccttgggagagtagttctgttggtatatattttttaaatactcaaaaggctcaacctcaagcagtaataaacacaagcaaaagtgatttaacccttaaaataaatattcagaaaaacctctctgtacatacaagtgaaagaatatgtaacactttcacgcaaaaaaataattataataataataaaggatttgttcatatatgtagctgaaatctgctgttccagcccacatgtccccaataaagaagggaggcacagacataggtgactactgtggttgactatcttacagcctttttgtactgggacactatcaccaccaaaaatttatccctcgttatatttttaaaattttttaaattttttctttttttttccttccttttttttgttttattttgttttgttttgttttacagcatgccaaatcctttggcatacgtgatggccttcaacaatctctctttaagtttttctttgcttgagtattccggaagtaaaagcacattaaagcaagtatgagatgtaggtaacctaaatagagaaaaggggaaaaaaacaggaaaactgtaagtcatgggaaatacacttagaattaaatgctcctatttttagattgtatatagttgagacggtctgcaatgcaaactatacattaatgcaaatcataaactttttgttgtgtaactaccaagttgcctttatcctataaattactcaaagctagtgacgatgataagatactgtatccattgagtttttactacataacagataccattttaggtactgaattcttacagttcatttaactaaatctttccacaacaaaaccacagagaggacatcagtaaatgcactttagaggttaggtcactgagaagtcaagtaacttcctctaaggtggagaaaatactcaaacctgttttacaagactgcaaagtgtgtgctcttaaatgcttattagaaacactgctggcaatatgactaagaaaatgatttgataacaggattctagcacaatcaaatgataatcttccgagcctcaatgtaaccattctaaatagatgatcatgttatatggctttcaattaacaagctgggaatcaaaaaagtaaatgaatcacactaatttgattccaaaccaatgtgagccccataataatttttaactagggcaatttcttaaaagtttcctcacacaatgacagcaaagtattttctcaattgtctaatatgatttggggatttgtatataaaatcacgaatgtgctcagaaactataaagacagttcatatgtatgtgacgaggaatgcaaggttttcggtaggtatacagtcacaagttaataattacctacctttctgtgtctgggccatttttggctataatcatctttaattttcctagtcctcccacaggtgctctgtctgtgcccgttgtaaactgcaagaagagtcttttctgttcatctgtaaatgaatgaacgatttcccagaactccctaatgagaaaaaatacaatactggtttcagtttggcattcattatgactggtactaacataagcttatgatttgcattaaaactatattaagagacaacttggaagttaattatcaggatagtatcacttctggtgatttaaaaatttccaagcaaatttatcctgaacagctctgaatacgtaaaaatttagattagattacaatatagtaaaatattagtactacaatagtaaaaaattgagaaaacccaagtgtgtagtaacaggaagtgactatttaaactatggtataatcacattatgcagtcagtaatgagcaaaagacaaaatcctatgaattgaaaaagactgaaatgaatatttggaaaaattaactccaggtgcctttgggtatatattttatttatcctttctcctttattctcctggtctactcatcctttaactcaactttgggaggaaaaagtgatacagattaaggacaaaagaaaaaaagaccccctgccccaaccaactggccccaaatgcaaacaactacatacctaatagcagtaatacaaaagttcaatttttatatgaactagaatactttaaacaagtaatatgtgctgtgtatggaggaggagaattattctgacatttctgccacctgcagttattttaagagaatgatttatcctgtggcattcctaaaatctatgtaataaaagctatgttttaatgacacttatgttagtttgagttctaaaaaacgaaatacaagctcataaagtgcaatcttgaagtttatttgaataatcaggcatctataaaacatatatacactagttcatagctaaataaatttttttttttttgagacagagtcttgctctgtcgctcaggctggagtgcagtggcgcgatctcggctcattgcaagctccgcctcctgggttcgcgccattgtcctgcctcagcctcccaagtggctgggactataggtgcctgccaccacgcctggctaattttctgtacgtttaagtagaggcaggatttcaccatgttagccaggatgggtctcgatctcctgacctcgtgatccgcccaccttggcctcccaaagtgctgggattgcaggcatgagccaccgcgcctggcctatagctaaataatgttaagattaaaaaattaaaaaaaaaattaaaagtatttttagttgcttatataatataaaatgcattttaatagttatttagaaagttctttccagagccaggtgtggtggctcatgcctgtaatcccagcactttgggaggctgaggccagtggatcacctgaggtcaggggttcaagatcagcctgaccaacgtggtgaaaccctgtctctactaaaatacaaaaattagccgggcgtggtggcagatgcctgtaatctcagctacttgggaggccaaggcagaagaattgcttgaacatgggaggcggaggctgcaatgagctgagatcacaccattgcactctagcctgggaaacattttgagccatctcaaaaaaaaaaaaaaatttcatctcaaaaaaaaaaaaaaaaaaaattccagaatgttagcagagaacatcacacatcccaaaccagtaattacaattttctaccttttgatattctaatatcccaacatactatttttattaccaaaatgctggcatttttggtgctgcaacaccatttatctgaaataacttaaaagttttattagaattcttggctttctccaatctcttgccacttcccttccctgcccctttacaaatccaccagtcagcaagagaaaacaaaaaagaaacacacaacaacagaaaactggacatgaaacttgcaggagcatctctcaggtaaggaggagaggaatcggaccccagttcatgatactccttttggggaggctgacaagagaaaacaagtctgctgtagcacagaaccctccaacatagcagaaaagctgccctgcagtgggtggtaataaagcctcctcacactgcaggagggctctgaagcttaactgaaccagctacacctaaggaggtagaccaaagagcaccaccgaagaacagagacagaccctgcaggaagtggcagatcagcagtggtcacaatgaccagtctggctatattattacggagctgtttctttggacttttaaacgaaacctttaaaaattttatacaatgaaaacagggaacaaaatgcatctctattcctataagtgttatgtgtgttacattaacattttgaattaaacaagaatgcatatatttagaaagctgaagaaaacacgaagaagcttccaggtttccacataaaagtggtggctgtatcgatcacatcctactcacatctctaaaaatctacccggatcaaaaaggggaaaataaaaaaaaaacctatgacttaggtctagagtaaaactaggagacagaacaataaactccaaataccaaagaagtggggaaatgagcagggtccagcaggagctacatcgaagagtggcttgtgcggaatcatactgattagggatcacccaaggccagaccccaccccctccaccacctgcccctcaacagagcactactgagtgtaggttagagcactggcaacagggtggttaaaggaaggactacagaaaagtacttgggtccagcaatggcaggctcaggaaggcaccatgcatgaaaggaaggggggtaccttcaaaagcagaagtgtcccttaagcggctgtaaaggggtggaagcagctaatgaaaaagagtcttcattaagctacatggagctgaaaaatcagaaagtggtgattctgcccttactaaagcaacagaagagggatcccttcaaccaagacccctaaagccacacaattcctccctgctccaccatgaggtctagtaataacaggtccagaaaaaagtaacatctgttatagaaacataaacaagaaaaacagaattcggaagtctaaataaagttattatgggaagagtctggcgaatgagaagcaaaactttccggtagacaaaagtagaccagaaaaattcagtcataaacaatgggaaactagtaacaccacattccaacacaaaaggagaatgcagcagcagacaagacagaccaccagtgatgagaaatacaaattcagaaagaaatgagcacatcttaaataaaaataagaatactaaaaaatactgaagaaatatgcaaggtaactttggaaataaaggctaattttattataaggtgaccaaagaagaagcagtatgactaaaatttctactgaggacagactctagaaaattaaaaaacaaagaaaatgaataaaataaacataactaaagaaatgcatatcaaagcataataacgaaaaagattaatagctaactacataaacataaaacctttcatttggcaaaaaaatcctataagcaaggttaaaagacaaatgacaaactgggaaaaaatatttgcgaatttaccagcgttaaaggactaatctccttaacatataaagtttctaaaagtgaagaaaacgaccagctgagcagcaaaatgagcaaaagactatataaaactataaacagctctacaagaaaaaatgtccattatcattcataattgaggtaagctcaaaaattgtaactatagtaaaataccatttctcaattggcaaataagtaaacatccacatttaacaacacattctgtttggaaagttttaagaaaagagatactgttgtaaactgctggtgggaatgcaaaatgttatttttctgtgaaggaggatttggcagtatctagcaaaattacacatgcatctaccatttgatgcaacaatcccacttctaacaatttatcttaatgatactttacatatgtacggaataatgcatgaacattaagaggattcactgtgacattagtactaacagcaaaaggttaaaaataacctcgatgcccataaatattgataagctatgctgcatccacacaaaggagcagtattcagtcatacaaaacaaaatggaaaacacctctgcaataatgtgggatgattctcaggatacactaggaagattattttcctagttctgtcctctgataaggcctacaagcagtaacgttcaaaagcaaaggccatactttgcatctaaaatctgacttctaaatgccattctccaacaatttattggaaaaataacttattccaggcctgagaatgaatgttcgagattagttagaaatctcaaaatctaatagggtcattttaaaagcacacgatagctaagcaatttgaatatcatttagagtaatgactgtgaaacgtattaaatacaaaaacattcattagttcgtaatattcaaaaaggcagcaaaaaccaaccaaaaaacaaaattaaattgtcactattaaaattattacattaactccttactctaaaaaccttaaatctattttatcatgccttttctgtagaactgtttttcaaggtaatcaaatggcacccaatgatgagaaaaaagaatgccaggtatatatgtaggacaagcagatggaaattttttttccccaaacagccattttgcaatccccaatgagataacagattaaggtaatgatactgataaatacgaaaatcaggtgaagggcaggtagcaggttctggaaagatgatgatggcaacgacatagttattattattattattttttgttttattccctcccaacctcccctacaaaaacagcaaactgaatgagaaaaccaaagacccagagacattatctacaacaaaaccatgaaccattgcatataattggacagaaacaaagctctgacaactacaagactggttagtaaggaagcagatgcaaggtaactgactgggtttctgacagccctgagaacactgccaacccactggaaagcacaggccaatctgaaaacagggcttaaagttttaaaaagttctacaggatctaatttgcagatgattacaaagggatcatgatgtagtaagctctgggcccttaaaacacccgaataccaaacccccaccagaaacaaaccttgtaccgaggaaaaacttctgggaataacttccgaatggaccaggtcagtaataaaaaccaaaaaaaagttcaaatatatgtgtgggatagaggagtaaagaaggcagtttcagaaagcacaagggcatatttttgaccattttacaaaaacacagacttctcctcgtccctaaaaagcgaaaaaagttatcctggcccatctctccctcgtccaagtatgagaaactcatttcactcacacacacacacacacacacacaaataaataaataacagaacagagtgaaacagtgtaattattagagaaaaagtatgtgcatatacatgagaatggtgtccctacagaaaatcaaagtacatgaaacaatatgcaaataaaacatgaaaactgtaaacaaatttcaaactgagctaaaaagaatttaaaaaataacaaatcattagaaatgggaaatttctgaatgagggtaactgaaaaaaaggaagacatgacacaactaaggagtaattagaaatgcaaggaaaaaaatcccatcaaatacaaagaaactaaaactaaactagaagaaacataaaggtgaataaaacagaacaataataccagaacctgaaggcagaagaaaaatcttaaaatcaaaaagaaacaaacccatgcttgagactctccttgctggtccagagccacagtgctgctgtgtactggcaggaggaattctgctataattggtcctggcagtgttcacctttcctgcaagtgttccacagcccagggacacaatgtggtcaggagcactgccaggaacaccagcaagggggagcctgccacaacaggcacaaggctcaggaagcactctccagcccacgaaaatctagtgggggtcctcttccctcacccaaacacactctgcgcagctcagcctggagaaggcccctcaagcagcactactaggaaccagtgcgagccccagtggactgagataaaagcaacaaaccaaaacagcaccataaagcctctgaaaaatggtcactggaaccacagctcacaaatatatgctagtacctacatgctataccttaacaggttactactgaagttaaaatttttaaaaagtacagagtctcctgatataataactaaaatgtccgagacacaatccaaaaattatctgtcataccaagaaccaggaaaattacatgaaggaaagaaaacgccaacactgggatgagtaagatgctgaaattatctggcaaggatcttaatgctgccatcagagaaatgatttgacaagcaattacaagttctactgtttcaaaaacgaaacaatagaaaatctcagcaaggaaacaagatacaaggaaaaaaaagcaaatggaaattatagacctaaaaaatacaataggagaaaaataatcattagatgggctcaacagtagagtgaagatgacaaaggagagaaatctgaacaaaagagagaaaatagactgaaaaatgaaccatgcctcaggtccatgtggaacagtaacaaatgactcaacatttgtatcattagaggcctagaatggagaaaagagtgacgctgaaagaacacctgaagaaataatggttgaaaattttccatgtttggcaaaagacacaaacttacagcttcaagaagctgagcgaaccccaaatagcacaaataaaactattctttgggaataaagggaaaataaagtcatcttcagaaagagaaaaacaaaaagaatttctcactagcagaactgcctttgaagactggctaatggaagtaataaaagatggaatcttggaaaaaataatggaaatagcagaaacatgggtacatacaacagagcatcactcccttgataagttctataagtcatattggataactgatacaaaaactgtaatagcattaatcctcaaaacaatactatttaaaagtggggaaagagacccaactgaaattaaggtttccatatctcattccatgtaatggtattgatggcagtgaatggtggtaagtcacattatctataatgtgatacccacaatgaccgtgaaaacaactataaaaaacacatagaaggccaggcatggtggctcatgcctgtaattccagcactttgggaggctgaggtggacagatcacaaggtcaagagttcgagaccagcctggccaatatggtgaaacctcatctctaataaaaatacaaaaattagccaggtgtggtggcatgtgcctgtagtcccagctacccaggaggctgaggcgggaggattgcttgaacctgggaagccgatgttgcagtgagctgagattgtgccactgcactccagcctgggcaacagagcgagactgtgtctcgaaacaaaaacaaacaaacaaacaaaacaaaacccaaacactaaataaatcaagggtcttaaaaatcttaaaaaatgttcaagtaatcatggaaggcaataaataaataaccataaacagaagacagaaacagaaaacaaataataaaatggcagacctctccctaacatatcaataattaccttaaatataaatggtctaaataaaaaaattaaaaggcagagactaacagtttttattaaaatgacaactatatgctgtttacaagagattcgtttcaaattcagcaacacaggatgaaagtaaaatgatagtaaaagacagatcatgcaaacattaatttaaaaaaaaacaaatggttacactcatatcagattcagagcaaagaaaatcgcaaaacagaaaaaacttatataatgataaaggaccaatcaccaagacatagtaattctaaatgggtatgaaccaaatgatagagcctcaaaataaatgaaacaaaacctgataaacagataaatctcagaagcagacctatataaatattctcaagtgatttttaacgtatgtgaaaaaaacaattcaatgaaggaagaacatacctagaaaatacataaggaacccttaaaactcaacagtaaaaaaccaaatggactcttggtttttaatcccagagaaatacaaactttttgtttacaagtaacatcacagttaatggtaaatattatagtctctctcaataaaatgaggaataaagtaagaataccttctaccaaaggttctagccagtgcaatagaggaacagtaataaataacataaacattggaaagaaagaaacctgtcttgatttgtagatgacatagctgtttactagaaaaccctatgaaatctactaaataactactagaataagtcaatttagaaaggttataggatataagatcaatatataaaaatcgattttatttcaagatagtaataaacaagtgaaaagcagtatttaaaaaataccactaatagcattagaaacatattttaagtttattcctaaccaaagagtacatgatttcaacattaaaaactataaaacagtgctgagataaactaacaaacatctaaataaatggagagacgtacggtgttcaaggattggaagaatatattgttaaaatgtgaattctctccaaattgacctgccccagtcaaggcaacccaaatcaaaatctctgcaggctttgcccttttgtttgtaaaaattaactgattctaatatttatatgcaaataaaagtcaaagcaacctaatgaaaaagttgtgggactcacagcatctgatttgaagctgcagtaaccataacagtgtcattttggcaaaaggacaaaacaaattaatagaacagaatggagaatccagaaacacggctcacacacagattgattttcaacaaaggtgcaaaggcaattcaatggggaaagaaaagtctctttaacaaatggtactggaacaaataaataaaactatttagaaaatgaatgacatccactgtctaacagcatcacaaaattttattggtggtggatcacagatttacacataaaagttaaacctatattacacaattagaagaaaacataagatatttgtggctttgggctaggcaaagatataaaaggacataaaaaaccataaaagaaaaaataaattagacctcaaaaaatgaataatttctgctcaccagaagacacttaagaaaatgaaaacttggagaaaataatcataaactacttatcagaaatgggccttttatatagaatatacagtattccccacttacccatggggaatacgttccaagacctccagtgatgtctgaaattgcaaatagtactgaaccctgtatatactatgcatgatttatttttccttcttcacaatttcatagatacaatactcatttttaccatagattttagcaacctcaacatatgatttttaaattctttccttaaaggaagcactttccagcttctctttggcatatatattcgaatttccaacatcactgctcttgtgctttagggccattattaagtaaaataagggttacttgaacacaagcatgtgatactgcaacagtcgatctgataaccagtagactaaaagtggtgggtagtctagacaacaacgatatactggaaaaagggataattcatgccctgggtggaaaggtgggagatttcaccatgttactcagaatagcatgtaatttaaaacttaagagttgttggctgggtgcagtggctcacgcctgtaatcccagcactttggaaggctgaagtggaagaattgctagagtccaggggtttgaaaccagcctgggcaacatagtgagaccctgtttctacaaaaaaataaccaactaaaaattagctgcacacctgtagtaccagctactcagagggctgacgtaagaagattgcatgagcccagatactcagaggactgaggtaagaagattgcatgagcccaggagtttcagtttataacaatctgtagtcatgctactgcactccagcctggatgacagagactttgtctctttaaaaaaaaaaaaaccaacgaaccaaccaaccaactctccctgccctgcacccgccaacacacacatacatcaaaaaccctgaattattcatggaattttctacttaataaatatttttggaccactgctgaccaaagataactgaaaccaaaaaaaagcaaaactaaggataagacatactgctatattttaagaaaatatctatagtcaatagaaatacaaaaatccaatattaaaaatgaggaaaagacacttttagttaaatatgcacctgctatatgctttggaaactccactcctacatgtttgcccaggagaaataaaacatttccacaataagactacacagctttattcacaatagtcccaaactggaaacaatccaactgtccaccaacaggtaaaaaaaaaacactttgcgtattcatataatgcaacactactctataattttttaaaaggcactataaatcaatgcaataacatggatgaatctaaagagtcttcatgcagtacaagtacataagattccattcataagaaattctagagcagacaaaagtaagctacagtgacagtaattaggacagttattgtctgttctaatgggggatggagattcactggaagggaaaacatgggaactctgtgctgatggacatagtctacaccttgactgaaatatggttacataaatgtaatttttaaaaactaacccaattaagccctgggtatttcactgtattcaaattttaccccacacaacatcgacaccaccattattaccaccacattgataacattcagagagcagttagggaatcacattattttgaaaattagtaagtaatgggaaagaattaagcattatcgtatatgatatgtacatatttatatacatgtatacagatcctatatgtggatctgtaatttagggtagtcatagagttgatgagaaagagtttttcttaagaagtattacaggtaataaaggaaggaggaataaagaattcgagtatcacaattttgtaaccctcaatgaattagcagatctaggcaatcagaatccacgataaaaattactagaaaagacagaaagcgagtgagacttttaagttattcctacaaaccaacatctatgaagtatttgggaaggaaataaactctgaatctgtttttcgtttttttgagatggaatctcactctgttgcccaggctggagtgcagtggcacgatctaggctcactgcaacctccgcctcccaggttcaagcgattctcctgcctcagcctcccgaggagctgggattacagctgcctgccaccaaacccagctaatttttgtatttttagtagagacggggtttcccccatgtttgccaggctggtctcaaactcctggcttccggtgatctgcccgcctcgggcgtttttgcatgtattttttcaggtgctgaaaaagctctccctgatttcatttcttgttgactgcttagagacatctttccaaatgtccttccttgtcactttttcaaagttaggagcagggattgcacgtttttttgattggtaatttttgtttcaaaggtttgattcagattcagagttgattttgctaggtatggtggctcacgcctgtaatcccagcactttgggaggccgaggcgggcggatcaccagaggtcaggagtttgagaccagcctggccaacatggcaaaacccttatctctactaaaaatacaaacattagccaggtgtagtggtgtgcacctgtaaccccagctactcaggaggctgaggcaggagaatcacttgaacccaggaagcggaggttgcagtgaactgagactgcgccactgcactccagcctcagtgacagagcaagactgtttaaacaaacaaacaaaaaattaacaaaatcttatttctagtggtttacatattaatgatgctggcaacttttagttgaaatgtattaaacagcctcgcagtttttatttttatgaattctgcatacaataaataaataccaaccaaaatatctatacaggcataccccagagatactgccggttcagtttcagaccatggcaaataaagtgattatggcagtaaagtgagtcacacaaatttttttgtttcccagtgcttataaaagttacgtttacattatactgtagtcaagtgtgtaacagcattgtctaaaaataagtacattatcttaatttaaaatcattgctaaaaatgctaatgaagtgagcacattttgttggaaaaatggtgctggtagacctgcttgatgcagggttgccaccaaaaaaactcagtatctgcaaagtgcaataaagtgagatacgcctgtaatgtcttttttctcttctgttattacaagcactactttaagtcttcaactaccgaatacttgtagactatttaatgaattaatattttcatcatatttatattgagaaaattaagaagctgaatttagttagaaaaggtttagaatatcatcaactcttgaggatgagttggaagctactttatctgtcatttttcacataacactagtttgcccttcaaatcatacatttaaaaatgatcttaagatacataccaagtagggattatgttgttataaaaagctagaagtaaaattaagactttaatttcaaagataatttctctataaagaatagcacaagatatgttcaactattctcagagatgcatcaagatatgactttttttcctactagaaattatatctatgatcaatcatattacagagatattgctgttatactccttgtgactgatgaggggggtttttcctatcaccatgttatcccaaccctttaatgaatcacctttgaaactcagaacaggtagcagcacagaggttgctaagagtaaatacattcaccactgctgccagaaatgaccaacggtgcaccagaaagaagaaatactggtgaattcccacataccacgacgaacaaccttataaaataacagaacaaatgaatataaagtaacatacagccatcccttggtatatgtgacagggattggttccaggaccacgtgtgtataccaaaatccatgcacgctcaagttctgcagttggccctgtgaaactggcatgtatgaaagtcagccctctgtatatgcaggttctgagtcccaccaatactgaatctgctcttagttgagaaaaaaaatctgcatgtcagagggcccatgaagttcacagctgtgttgttcaagggtcaactgtaatataaaaataacatttattgctagatagagttgatattcattctagtgtttatatacttgagtcttagagcaatagcctttggagacaacttccaggaaggtacgtgtttgcatgccttctcactgcaatccatcagtagctgccacttgaaccagtcttagcaggggatggggaagcctatgtctttcagaattggatgatgtagtacacagaagtagacagtagagtagtaagggcatttgcttaaaagcagatagaactgggaacctctacatctttctgtgagaattcagggcttagttttttagggtgtaaaatggaaatactagtatgtatctggacatattatcttaagaattaaataaaagactaccatttcactcaaaaagtgcttgatcctgggaagccatgtaacagttcacaaatgcagagttcaaaagaaaggaaaaattgcagacatggtagccttattttaattatcttctaaccagcagtaagcatactctaaccagtgaggaatactagataatccatacgccaaatgcaggagattacatgagacttatatataacaacacttcattcatgaaataaatcacaagattagctctgaaaaatggtgattatattacaaatacaaatctaagtatatagatgacaatttgtgagtttgcttatttgggaattagtacctagagataaaggtctgaagcaaaatcacacacccctttggtgaatcaaatcttcctctgaagaactaagtacctcacctaatcagaacagagtccctggtatagccaccgtcatattctgtagtttcttctagtgcttggaaatctagattctgcaaattcaagaaaatatgtcttagttatctgctatactactgtatcattacaaacaataaatcgatacatgactttttgcagacacctgctttcttacccggcttccacatataagcaattcaatttcttctggtctgaataagtactttaagggagattcattggtcaccatatgaaaacctctccgaaaagccttgaactgtttttctactgatttattgagaatgtagtcagaataaagattgacaaattcctgtagaaaacattaatcacaagaacttcttataatatgctatgcaaacaaaacacaagttattgggctgcatagctttttaatttttccaagaaaaaaacattcaagaatattcttaaaaattcaattttacacctacttcttaacaatttcacaattctctgttatagccaatattaagctatgaaaaggccatatacataaaactgtcaagaatattcttaaaaattcaattttacacctacaaagaaaactacttcttacaatttcacaattctctgttacagccaatattaagctatgaaaaggccatatacacaaaactgtcatacttataaatgtcaatttcgataatgtattaaacagaactgaatataaatgctggagacgcagaaaattctttaggttctctcaactaggtatgtaaacagacacatttaaaccatgtatccatctatttataaatgccaaccgttttaagagagtacaatatatttgatttaagcaaaccaggaagtcccaagttttctaccatagaatatttggtaagctgcctactgtatccagttcagcaaaaatgtggaagtactgactgacacataaactactgtatcaaatcataaaaggaaaatgtgctttgtacccttagtgtgtataatatttaatcaaaaaattatatcaatataaacatgtttcttaaaggtatactatatatttgtcataattttttgcttgttatgttctgggttattcccattcccgatgaacacattttagtcaatagaaacccaaatctgacgtaaagtatacttttcagaaatgtatttttatcacaaacaggatatacatgtgtaaattaaatgtaatttttatttgttctgtgataaagaccttaatcatgaggttcctgcttacagcttaatacaagaaacaccctgcttcttgctttatactacaaccacacttagctattaactatctcctgcttcatgtcctctttctctaaaaggggctttagtgcccaactgtgtgctttcataccaacttatatccaagatttagaaaagtggactctagcatttacataaacttagttacttgttttttttttgtacagactatattagatacttctttaaaaattataagcatacatgctttgaaagtgttaatgaagagacaaaatgtgacataaaaacatttattaccttcctgttttcatttgtaattggaattttatcaccattttcctttagatcatacatcattgggttaccaaaaagatctgtctgtgatatctggaaagtgatcatcatgtcatcttccacattcccttcatactccaataaatcttttaaactctgatatagaacctagcaaccagaaatggtaaattgaggccaccatagaactacaaaatacaacaaataatttatatcactcttcttagaagacaacaaaaatcttatcaataaaaattgtaaaaagtgtagacagtatccctccagtcccccaaatagtttccaacctataaaagaaagattgtcagtcactgtgatgtcccattctctgctgagaaaccccataccaccaatttagcaatagaattcacactgtgctctatgagaaattctgtggtgtctcaaggtgggggtgggggtggtaggagcaggcacactcgttgtaactaccaagacccttagccagggctactctgatttttacctatctcttaagatttcactaaaacacaaacaaaatgtttagaaacacttctctatgaaatcaatcttacaaaagcttcgtgctgacagcaatatataaaaatgtccccctttgagtttttaagtgtttctggtacttcggtcagattaaaacatttttatcttattgataagagtatcaacaaagattctaaacaaaaactttaaaattttgacataaattaaatttttgcatttaaataaaatctaagagactgaattaaaaaaatgacaaagaacttactgggtgagagtctcccaagtcacgaaaagttccttttttccccattagcttcctgtagacaaccatgggaaaatgtacatccagtatacagttattgtaaatagccagacccagtactatgccaatcagagtaaactgaccctcagtttcaaaagaagatggattaaaccaaaacaattttgtagattcatcgtatgtgaacatacctataagaaatgatttttaaaaatacattacttttgtattttattaaggactgatgaataatacaaatataaacttaaaataattatgcatataaaacatttaaaatatatgtaattaggcatgcaacattgatttctattatattagcacttgagaaaacaatgtccacatatatctgctataaattggggtgaatggtgatatgtaattttatgaagccaaaggaataaagtagtaagtaatttggtggcatcgggtagaaaaatacgttaattaaattcaagctttctaattttctactaacacataagaaaagttatattcatgctttatccacccatagctgaaaaataaacataaaaaaacaaaaaatggctacatttccaaagtgtttcatttataaaaatataattacttatatctgtaccacacgtactatttttgaaaacaatttttcatttttttccttgagatggagtctcgctctgttacccagggtgggctggagtggcacgatctcagctcactgcaacctctgcctcctaggttcaaacaattctcctgcctcagcctcctgagtagctaggactacaggtgtgcaccaccacgccagctaatttttgtatttttagtagagaaggggtttcaccatgtttgccaggatggtctcaacctcttgacctcgtgatctgccagcctcagcctcccaaagtgctgggattacaggcgtgagccaccacacctggcctaaaaaacaatttttaatcacagtaaagaaaggttcgttttttcaaaattagacaatggtgccatgaaatttttctagcattttcctaataaaatcagatgatctgaaatacataaacctggataaatctgatgaacttagataaacaaagctattcaatacacatgttaattatgggccaatacgtaaaagaaaagtagtttcgtagtctttcaatttcacatggtcttcactatgcaagccccaatcatggaggcttttttttttttttttttttttgagacggtctcgctctgtcgcccaagctggagtgcagcagcactcagcttagtgcaagctccgcctcccgggttcatgccattctctggcctcagcctccggagtagttgggactacaggcgcctgcgtggaggccttttttatatcactcattggaaaattggggcccggtgtggtagttcacacctgtaatcccagcactttggggaggctgaggcaggcagatcacttgagctcaggagttcaagaccagcctgggcaagatggagaaaccccatctctacaaaaacacaaaaaataagctgggtgtggtagcatgtgcctatagtctcagctacttgagagggtgatgcatggggatggtttgagtcttcagcctgggaggtggaggttgcagtgagccgagacagaaccactacactccagcctgggcctcagagccagatcctgcctccctccaccaaaaaataaaagattaaaaaaaaggaaaattggaatctttggaatgagtactactaaaaattgatttcttcccttttaaatgactaaggaaaaaaattttaattgaatttaaatcattttactacatgtttagttgctactgtgaaacaatgaaaacatcttaagaattaagtctgaaaaaaatctgtaatttccaatagaaaagtagagcttagaaatcagaaatcaaattatacagtatataagtattttaacctgtttataagaattttaaaatctttgaaaatgtcattgtcactttaagtttaaaaataaggagctttaacatgtttccttgatcactaggagtatgaattaagcttaggacattttctgaatgcaaaatggtttgaaaattaaacaattcatatttgagtttcatggtttctatctaaacattttttttacaggccaagttacaacatccatggaaatgcttttagttataagtatggtattaacaggatcaagaacagctgacaaataattacaattaataaatttgttcaagctgacaatggtgtgtctaaaaaattaatgaatttaataaaatgtcacaaatgcccttccttggaaccaagagcaacaagctataagttaatcagaatataactctgaagttccattttaggcacattttctcatgttccagggagaaaagcaccataacctcctggtaaaatactcctttttgatacttctactgccatcacttcagttatcttactggaactgcttaatctatgttttttcttacaagtatttctgcatataatgcaagtatgctttatagctaaggtttaacatttctagatacatcaaaagctagagctaaggtttaccaaatttaagaactttatgaagtttataattttctatctcaaaaagggcgtcgtcttatgtatctctgatttacttagaacaaactacatacaaatggcatagctttttagttattaataaaacactagctagattatagataagggatgcgtgtgtgtgtgtgtgtgtgtgtgtgtgtgtgtgtgtgtgtgtgtgactaagaacagtaacagaaaggtcaactcaattagaatcaacaggctataacagctcaaatctcaaagctgaagggaaatgacatacattattctatgcacactcctcacaattctgatggtaccttcagtggaaaccttttcctgtaattgtcatgtactcaattttaaacgtaagcaagctcagttactaagtggttatatttacagtagaaactgaaccagttcagaattatgaagttaagtagactacccaaaagactgcatcttttccctgttctactttatcacaaaagggaaaaaactaaaattctgatccttcactttcaaatttccaaatcccatcagcctttcccaaactgtgttcaataacaactcttctgttagggcagaaaaagagttctggagttcaaaaagtttgggggaaacactacctatattaagccccaagaaatcttatagcaaataaacctaattaatgtgatatcagctagtgtttctgaactttgagcatgacatacttgtgagacagtctctcaatactcttcaaaccattgttctttgaagttcacaggtcaggaaaaccgtgagtttgatgatggttttagacaacaaaaagcaaagaaatccctccaactgttccaatataccattctaaagtgctttcaattcagtttaccaaagagataatttccttcattagaatattccttctaagaaataaaagaatttgaataaattagtgatacaaatcagttcctaaaacctacaaattcagtcatgatgtgtgattctgggtaatccataccaaatccttcttttgctgctcttcatagctgaaaatatttacaaagtaagataaacaaataactaactcaaaagatgatacgacaccataatcacattactaatgtatttaccaatatctggattgaagatttcctccacaaccagctgaaaaaattctttggaaacacctccctcatcaactccttgttctccttcaaattccacatacaactgcttcttcaagtctgcaggattttccatagcgatcatctctagctagtgattgaaaagataaacatgaaaagaagatgattgctagtatcaggaaaaaaacaaaataaaaacaaggagtaggattaggaaacaaatacaaatttttgactttttgtatgtaaatggaaacagaaagcaaactgataaaaagccagtgaagacaaagattcagtcttaaagataatcaaaaagacagacacaaaacagacactagcatagtaaaaagctaactttactgatttgttatgaaattaacatacaattaattaagattttattacttgtgtgttaagtctggactacacaggacatggaaaagcagctaaatcatttcagcaaaaacaatggagtagaggtctaacctcaaaattgttcattagtagtcctttattagaatagaaactcaagggttaagtcttagtatctactaagtcataagtaaaatatttcaattaagaaaaatacactgaatactaaagcagtttatggtctctcacagtaagacttagtataaattaccaccttttaatggactagaacccatcttatatccacatttccttaaaaacaggtgagacataaccttactcatgtccttactctttttttttttttttttgacatgaaatctcactctgtcgcctaggctggagtgcagtggcgcgatctcagctcactgcaacctccgcctcctgggttcaagcaattctcctgcctcagcctcctgagtagctgggattacaggcaggcgccactacgcctggctaaattttttatttttagtagagatggggtttcactacgtttgccaggatggtcttgaactcctgacctcatgatccgcccacctcagcctctcaaagtgctgggattacaggcgtgagcaactgcacccagcccttattcttaaattgtaagttaacaaactttagtgtctagcattttctcaactataaatcttttaccaaatatttttgtgtacctatagaattatgaatatacagtaacctcattgagattaatcataaaatcaacactagattccaatattaactgtttatactgcattttgtttgttttactttatgtatctaaaatttgctaacagtatgactgtatccagtacatggatggatactgtatctagtacatggatggatactgtatccagtatccatcatatctcctaacttgccttcaaacatctgttggctggttaaaaaaatttaatcttggagatgaaaatttaccaaaacaggatattaaatgttttcaggttattccaactatttcaaacagaattttaaaaatggttttgaaaaatgcaataatcactgaaacaactgtaacacagcactatagtagttaaagtaataatactcatttggacaatctagtctgtctacaaaaaataaaatctcataaattaacgcatcaggtcaggttgcccgagagcattgttttttcaaacttgtcacctgcaactcattagtgggtagtctaatccatttagtggtttgcaatcagcaatgggaaaatcagaatgcattccacatagtaatggaacctactgttttgtgaaacttttgtttcaattagatgtacagatggataagcatgtactgggatgctatgtaaaatactagggattgcagtcaaagagtttgacaaaactagctgaaattatcttctgggtatcttcaactttagggtcctattctgtgaatttagtctttagctttaaataatgtctgttgttgttcaacaccgatctctaatatttacaaaatcatttttaggccacacagtttacttttagacaatgttttgttatggaaagaccaagagtcagtcagaattcaccttactagtcccaactctcacttaccataacttttaacctttaaactttagcacgcgattcaattaagcctcagtttcctcaacatactgtaagttgtgaaggcttattaagaatatatgagaacgagtgttaccttttaaaatagttttgctctctgaacaacagatttgcaattttgtgtccccaaaggaacttgatatagactagttccaagatctagagtcaaacaaatgtagatgtgaaaataaccttggggaaaaaaatagtttcagttggaaacctgtttcaagctacggagtatacagaattctgaggagactaaaattagaattaacatcttagctcaaatgtgggaccaggccaacattccatattgccatgtaatccattctgagtttccttatgccagttcccaactggctaggtgttaaagatgtaagtcagtgtttatatttacctttacatccaaaggtatacttgcttttatcaaatataatgtattccaaagtggggaaaaaaaaggttatctggtatttagactgtgcattctacagcttttccccactaacattcatagatgagagctgactccttatcaatgtaaaaccttttaaaggatgtggtggtgaatttctacaggattgagaggccctgtgttctatctagtcttagctctacctaagacatgtcaaatgataactgaagcaaatttatctttattctccataaaatattacatgtctgtccacttccactgatctctattctatgctccccaccttggtgccaaaagaatgtaatgcaatgcaatatgttctattgtaaatgcaaacatacaactttacctctcttatttcatctgtaaaataaccataataatatagtaataaattaatgtatgaactgcttagattaattccctgcataaagttagtgcttaaaagtactagctgttgttgctgttattttattggttctaaaatattttctgaaaacctaccatagcattatagaacaaaaatattccatgaatacagcaacaataatatatagcacttttgtagcatttcacacatagcaactaatttaatcttcacaacacccttatgaggaaggaaacattaactccactttacagataaggaccccaagatactgaaaggtgaaataacttcaagtcacagtaagtcacagtaagttgtggaacagagatactaatccaggaaacaagctcttaactactatgctttactcactctcttcaatgacgaccaaaaattttttttttaggattatgagtgatttttattttccttattcttttccatatttttccattttttacaacaaatacatttttcagagtcagaatgtgttcaaatataaatatgtaaaaagaataatttgaaaagtagttggtaactgaattctgtaggcaaaaattttgttattacctattttagattaccattctggtacacataagtgatttcataaaatactgtaccacttaagaataaaggctgggcgccgtggctcacacctgtaatcccaccactttgggaggccaatgcaggcagattgcctgagcccagcagtttgagatcagcctgggcaacatgatgaaaccttgtttctacaaaaaactaataaataaataaataaataaataaataaataaataaaaaatagtggggggtggtggcatgcgcctgtcatcccagctacttgggaggctgaggtgggaggtcaaggctgcagtcagtagagatcgtgccactgtactccaggcctgggtgacagagttaagaccctgtctcaaaaattaaaataaataaaatagtaaaaacagaatacataaatagcctttaaaactattttattttaaattattaacacataaaatttagcaataaccattttgataaaggccattattgcataaacagctgtactgataattctttttcttaaaaataacctccatcaattgttcggtcaatttaaaaaagatttaacaaataaactgtaaaggtgtattctttacataatagctatattatttaaaattgtatgttgttgtttaaacccaaacctcaccataaaactgtattttttaagtcagaagttgttttaaatgcattaggatatttgaaatttggaggactatgtctaaacattctgaaaaggagaacgtgcatgcatgcctgaatttatttacaatacacacgtggatttttagggttttttttgtttgttttttttttttttttgagacggagtctcgctctgtcgcccaggctggagtgcagtggcgcaatcttggcgcactgcaagccccgcctcccaggttcatgccattctcctgcctcagcctcccgagtagctgggactacaggcgcctgccaccgcgcctggctatttttttttgtattttttagtagagatggggtttcactgtgttagccaggatggtttcggtctcctgaccttgtgatctgcccgccttggcctcccaaagtgctgggattacaggtgtgagccaccgcgccaggccaatttttaggtatatttaaaagtacagtgtatgttgtatttatttaacatggagactagcaacagacagagattactggggaaaaataaacaaaaatatcctggatataatcatatctacctcttcactgcgtaacttcctcttctttaagactcttgatttcatcaattgctggataaaatgatttttaatttctgaactttttaattggccatgatgatgaaatcctagggagttcattttttaaaaaaaaaatctgacctgatatcaaagcatttgcagaatacctagcaggatgacatcttaatatcaaaatatgatattactagacttacaggaatcaaaaggaaaaccttatcacttaaaatcttatagttttctgagctattacatcaaatcaattcataattttttaaaaaaattccttaataccatgaatatttaagtagaagcaataatcagataaaagagacctctaatacttaagaatgcctgggatttctaagaaaggctagcttcaaggccgggcgtggtggctcatgcctgtaatcccggcactctgggaggccgaggcgggcggatcacgaggtcaggagattgagaccatcctggctaacacggtgaaccccatctctactaaaaatacaaaaaaattagctgggcatggtggcaggcgcctgtagtcccagctactcgggaggctgaggcaggagaatggcatgaacctgggaggcggggcttgcagtgagccaagattgcgccactgcactccagcctgggtgacagagcaagactccgtctaaaaaaaaaaaaaaaaaaagaggaaaaagaaagaaaggctagcttcaactacttcagtcaacttgaggcttaaactattgcttgagatttccagattatccaaattaattttttcatgttcacgataaacacatgaagaaaagtctgttatatctcaaatgtagtttaaatgtttgggtaacaccaaatcacataatcacgttcgtccatgagacctggaatcctgacttctatttccaattctgccattaatttatgtaggctggaatctcttttagatttcattttcctcacatgtaatactaagtttgatgtttcattgtcttaaattattatataatgctgaggatctatgtatatataggcttcattctctcattcagtttctgagaaattactttgagggcataaaccaagcatatttcttggtttcatttttgatttcaattagaataaatcacaagaaagaacaatggaaattacatgttaaccacaatatagtgtatgtgtaagacaaaattaaacatacctagtgcagcacagaataatctcatttttaaagctctgtgagtcaatgaataaataaaagaattacgttcatgtttcactagtaagagtgttcaccaatgctggaagctgggagctgaaaatgctggaagctgggttagactaggctattagaaaccagataaaaagggccagtgacttttagaggggattttgcagaacctcctggtagtggggctttttatctgtgccaatcacctttatctgtgctaattcctatttttgaacttccctattcaattccacatctcagccattccttttggtttttagatatttatgtgaaatgctagaactccctgactaattggaaccaagtttcacatcatcatcatcctctattccaagcttgctgtccccatgatcctcttaaaaatctgagtttccaaaacacataaacatacttgtatatcaaaatggcctttctctttctctctatatatgcacacatacacacataaacacacatgcacacacacccccacctgagctgaaccaaaggccatcttcccaaatattggagtctggctttatcaaaatatttgtggagtattaccagaagttcagattcataggctctacaatacagcttctaatctaaacctctagaggttagggccctggattttatttatttatttatttattttttttaaacaattttcccattcagatgtgaaggcagtttgagggacctcatgatggcaatactatattcttccataaacttataacctctatcttctcctttaagaagtaatttaaaaaatcttaatacatactatcattggaagtgcttcatctaagaaaaatgagaaattatctacttgtaaaagaacacacaaatgggtatatttacatatttgtaaatatgtaaatatttacatatttgtaaatatgtaaatatttacatatttgtaaatatgtaaatatttgcatatttgtaaatatgtaaatatttacatatttaaattaaattaatttacatattaaattaaattacatatttatattaaaaatgtaaatttgtaaatatggttttacatatttgtaaaaacctcatcacattaggaatgtcattcaaatgaaaggtgaagtctaagctcatgtttatcactgtactgttttctaaggaacaataacgaaaaaatactgaaaataagtcctaggggaactatggcagtaagttaaacgggtagggtgggggtgttcttaagcagttctaaggtatttgtgaagagacaacttatattctattgattctaaaattcacttttttcacattatctctgaaatcagattacaccatacaaatgatagcatcttacaatgaattgctggtatttttctgtcttagcagtaataaaatgatagtgtttcctacaatcagagattagtgaaaatactatcaacatgaattcttctcttgtcatcaaagacaatttctctaaaaacctcaggaaaaaagctgctagtctggtttgaatttcacaatatataaaagcaatgaatatatttttcttttttaaaaaaatccacaattattaattcaagttaccactcctcaacagaaaacatacaagagtctcatatatgaagtcactattttctgggcttgatttctaaactaaggagtggataactctaaggtttcttttagctcttaaagcctaggatcccataattttatttatcaatattaagcttaccacaaagtttctcatttcttcttttccacccaaccctgctatacaattccaaaattagcaagtcataaaaaagtggccactagtttgttcactgtgatatataagaatgaggcttaaaaagcagagatccttgggaaataagatcttgaaaaattcatcacttttgagctttcatatgagagaataatcttaaaccactttctattatagaacttctactatgtgttactaaaatatgtggctttatcataatcatcacctgctgtgaatacttacttcaaaaaattacacaggttatcaattttacttataagacctatttcgatgctggtttttctagtcttttcacattctgttatttttttaaaaaaaagaaaaggaagaaaaagcaagggagaaagaaagttaagagtaaaatctgcttagtgtgagcattcagagcccctaaggaagcttctctgtaagcatcatctctttctattttcacagtttattaaactgcctaacacacatgatttctgaagtgaactgcttttgtgggctggcaatattcaagtacatatactatctagtgaatcctgatttatgataggccacactatattatctaattttgatataattaagcagaacttgctaaaaacaagttaccataattaaagagctcacagttaattttacactaacacctaaggctttaaaagcagttgtttccttaaaattctagaatagaatttaaaatatagaataaagtatataccaagtacttaaacttttgtttttagtcttgctttactagagaaaaaaatgggggactgaggaaaataagactgagtagacttctgagcgaaagacagataaggaaggtagacaattttttgaaccctggaatgattcttacagtgtaatttcattgccttttaaaggctagacatagcttttgatgaagacagctgaagggatctcacctcaagaagccaaacataaagtatgtagctttggcatttgcagttctgctccaacaatggatagtcatagacagacctcaacatacctttcataaaacatcactcacattcttataaaataccctatcattctgctaaactatgtaaagtaaggtgctggctgccttatgatcagtcattaagtgtattaattattcatgtgtctcaaaactatgtaagtgaaataaaaagggtaccagaaagcaagcaataataatgacttcaggcagttaaagcccccttttgtctctgctagaaaaccacctgagttgcttaaataatgcagaatctttctccaacactataaacatatctgacattaaaaaaaaaaaacaaaccagtaacaaaaaaaaaaaaaacacacaaaatctctgcaatttttaatttctgagatgtcaaataactttttccaccgggctacagctttatgaattctcgaatttagacaattctaaaactaaaatttagacattctaaaactaaaatacattttaaagtaaaaatcacatttcctagttgtctgtgtcagacaactttactagtatactatagtattattaactaccttaatttttgttgacattaaattttacttgaagatgataaaaaagtagcagcaatgacagggatagctaatactagaaatacaataaagctctgcgataatgcacctgagacaaatgtaaattttggtgaaatgtgactgacgactgctttctgtcttctggccactcttatattcttaaacagatacactaaaattatcttgtggaggaaagaaaaggaacaaatggcaaccccatctggaaaaccaggaagttaggatgagtacctgagtttccagtatttccctgctcaatctccctggacttgatgttacaggcaccactaatccccagatttttggaatagctgctgttttccagaagttccaagacccagagttgtctctatgaatttttaagtgggaagaaactaccacagccaggcagtgccgtccacacagggatattctaagtggcccagcaggactcaactcttactggcaacaggcactgatctgccatggtcacttcatcaagtccacaataatgcaactctgaattttacacgatggaattttttggacactacctataattttatggtatggttttactgtaccattactcccagttcaagactgcacatccacacttattattgggtatctccacatttctcttgttctggtctttgtccaacactctattctcttctgaatgaaagaaactttggatttagttttcaagatttagaaaacccattctttttcaaagatagcatgaccattatataatacaaccgatactttgtagaacacatctataaacttgcacaggaacaacaaaagtataatacttatataagatcagaaatgtccatgtgttcctatgctatatggtatcatttttttcagtcacttttaaaatgaattcactgaactgtatcatgatatccccattattaggtttttaatctagcagcccaacttacccggacaagtgcatcatctatgatatggtcacgtctaactttgagtctcaaatatggattcaactgctgtccttgaactaagctgtagagaacagtgattcttcgttcactgtacatgcgaattctattgtcataatataatcccaaattctttgtgacagcattcaatataaagggacatgtcataaaagagaatttgttctctgtttctactttgaaaaaagtataatctttatccatttctagaacctcattcagtggttcattaataaactcttcaaaagggataagtggttttcgacaatccagggttttaacaccaagttcagtttccagggggtccactcgaggacctttcttgtttcttctttcttctcccaaaagttcctgaagtgtcagctcgctggactcagggatgggctcttcatcatcttcttcattgtgatttgtgtccacttcccctcccactacatttgcatagtaaaccattttcaagcacttcgaagcagcaacaatggcatcatcatcattcactagatttcgactgttaaattcattgcttatgactttataagtaataagttgctgaaatgtctccatcattctccgaatctggtctgcattgtatttagaccacagtctgatcagttttccttgggctgcaaggggtagcttgctcatcgctttgcaaaataatggcaaagccatttccagatattcaggactgtggagatttctattctccattacgataatgaacaaattcagataattaggatctcgagagtatacattgtgatacgtcaagtcacattccacgttaggtgacaaatatacaagtgcattgagaaaggcagtttcaattttttcattagagagcaatctggtgtagacccttctaatggcatcaatatccacagacacatcatcagggcctaatttttgcaaattgttgtctccctgtgagctatcacctatccttgaggaagatgcttctgagtcttcttccatagcagcagcagaacatgcagctttttccttttcatcttcatctttgtcttcatcttttgcttgaagagatttcagttcttccttggtgtgttgtttaactttccggaagctctgtaccaatgcctcagcactagaaaaaactcttccaataacacggattaaaggggaataatcctctctttctctacataattcaagaatttcatataccttctcttctgttaagtaagtcacatctagaaaatcagaggaaaaaagagaacatttattttcataatatgtatgtttactctgttgcaaaaagttctaaaagtaaaacagccaaacattctaggctcaatatcatttatgatatacaactcttaaagtatctaatacttagattcagcaaacaaaatttaatgcttacctatttttttcaatgaactacctacctataccaatgacctcacccatgcttttacattctttcaacaatgtataactcttaataagatcatgagtttaaactttctttataatcaagatatctattaatgtatagctttaattataaatatgaaccaatatgtcatgtactgattaatcataatacagctcttaaaacctcactgtagaacacacagaaatactactaatctgtgagttttcttgtttcagtactctgttctccaaagactaagaaggcaaggtcttaaaaaaaggctccttcagcatctatgtatgtattaaaatcaaactggttcattttgggtcttcctagtttgttccagggtagtcattctgtgagtgattgagaagaatataccatttctcatcggctcttaagtagaaactgctttccacagccaggaatcaggttagactaaatctcatagagtgacagaaaatagtttttgagcaatgaaaacaaacagtgcaaagaagtaaacttatgagctggcaagcagtgcagagactatgtagtcatcaaaatctatttcctcttttcctgggcacagagttggaccacatttcccaactttttgagataagtgttattttcaggccaaggctttctcccttctggctaataggatgaaagatatttcatttcacaggtaaaaacaaatgatatattttgtgtactgaccaacataatactgagaatagtcttaattctcccttttatcaataaagtgacatacttgtcatcatcagattaactacttgagaggttaattttagaggcacacagacaatcctacctccattgcgccaaatatacccttatacatgtagtgtacaacatgtagaatttttaatgactcccacctctgctataatatatgtttcacaatgaaagacaatataaaatgtaagtgatcattgaatggtctccaaaaattgaagcacaaaaataccaaattttatcatactaaggatctgatctgtggcccagctacaagagtaccaacacttacagtttcttttatgggccttaactctttaagaactaattctcaggtttgttctattaagaatatataagcatcttttgctaaacatcagtaacctcttccccaaaagcataaaaccactggaaacctatttctcattattttcattgaaaatttttaaaataccttcttacaagacaatgcaaaactcctaatttcctaaaatgtaacataacagaaaatactactatcctattaggacatgaaacactttgcttcctgagcaagtcataaggttaacaaagacttgctttgcatgcagtaatatggcctgtcctagggatcaccattctagactcacatgtcctttgttgatatgtcatgctttcggaacatcttcaagtgattctgacagtctactaatcctatatagaatgtacctatactttttccaaggagtgttttttgttgttgttttttgacatggagtctcactctgttgccaggttggaatgcagtggcaccatttcggctcactgcaacttctgcctcccgggttcaaacgattctcctacctcagcctcccaagtagctgggactacagatgcacgccaccacaactggctaatttttttgtatttttagtagagagggggtttcaccacgttggccaggttggtctcgatctcttgacgtcgtgattcgcccgcctcagcctcccaaagtgctgggattacaggcgtgagccactgtgcctggcctgtagtgtttaatatgttaaactgaatttttcaggtatatagataaaaattagtcaaaaaacactgtaattagatatgaacattcaaaaagtttggtttattgatacaggtgttctactgagaaagacatttttataagatttcttgtgataaatgtgtccctgaaaatactcaatcttttaaattttgcacttaaaaacctcctacgcaaaaacagtttggtgcagactacttaatacttatgcaactttgtaattagtgttaacaaacataattaataatcaaaataagagtactagtgtacagaaagcatctctaatttccaatatacaatagtaactatagaacaatgcaaaaacaaaaacaaaaaaaccagtaacgaacagggaacagtaacagtagcatattagaaaacagggataaggaaaggtcacaactgctataatgcagacttgagcaaaaagaggagggggcataaagactggataaagccacacaataagcacctctaagatggagcacgtggccaaaagagcagatgagcacattcctcatgtaccacatcccccgcagctggctgcattccactgtgccagcactctacattcagttactggtactctctggtgcacacttactggagaactgtgtacaataaagtcaatgcagcttccacattatactgacacactatatatacagacaacatttacctattttcccatagtgtgtgaactaattcatgaaacagaattatacactctgaagcaacaaagttgtgtaaagtgacgaaaataattttattgtggaaacagagtagaggttataacacaatgccacttcactaattctttcaaacttgattcaaatgatgttagtgaaagttttagaggcaaatgcctctaaaattctctgacttgtatgtcataaaaaaaaagctttctctcttaaaatacaattgcctctgggtgtgtgtaggggtgagagtggaggggcgctaagccctggtagtcattcaaaaatttgattactttgttactaattaccttcactgaagaaaataacttggagttttagtattagcgacaaggtaatcgaattctgaattttggacgtaggaccatttagaaaacaaaagacctgagtgaagactgtcattggtaggtcatgatccttggcagcatgactgtaccaaatgtccggaaggagagtgagaagcatatatctgaaggaaacgtagaattctcacataactatcacaaaattttgtcttgccttcaaaaatggaaaaaacccactgtttcctctttctgcttctttcatcacatcatcctgaggttccagaactcatgccagatacttagtccagttattctataacttaaatagatgttgtggcctagttttggagattcactaccacttaatacatttttcctaagaattttaaaaagttcaaatcaatctattaacaaatgaacttttggcatatgatctgcttctaattagcaatgattagacctgtaaaatgtagttattattcctgtccgttaccacaataaaaaattggttctacgatatcaaaatgtctttatgtcacagaagaaaaaacaaataaaaactaatacatttaaatctcccacatggttttcaggcaacaattctcaattgaaaataaaacatcttacctttaaaatcaattctagcgcctttcttgttcatttttatctcagagcaggagttgttgggggcacctttcgagttctcaaggtaagctgagcttgctcctttcttggagggatgaggatcacagagttttgcattaatcttataaagctcgagggctttaatagctgctgcattattatccatacgaagaaaagttggacaggaagcacaaaactcattcgtgcaggcttcatttccacagccctcagttaactggtggtagtagcgttctattagatgctttgcagctgctcgcttcctgtaccaaacattcaaacaataagcacagtgattagtacagctctcaagtacaaagctcaacatatcatcaaggcaaaagttagtcaagcactgaagtgattaacctgtgtatgaagatgagaagtagaaaatggagatgcactatttaccacaactcctgactagtgaaatagttaataaatattttctaggatattatgataaagaatgtcaatgcttactgactgtattaacagagtatacattcctttggtttaaaaggggggaggggggcttgtctgatggtatatgtgcttaagttgtttagtacaacagctgaaaaatcacaaggtttacagctaagagttgtaggattctatcattttaaaaattagcattaggaaaatgagtctatttaaagcatcaatccggttttcttttacataatcagtatttcatttttaacagcttgtaaacatttgacttatagttaacacagaatatctatctggaataaaaactatttttcccaattatcaacaacatgggagacttaaaaataaatttgtaagtggaatatccaaagatagtgttacactgaaagaaagcggctgcagcctgagtgaggcagatcatgactgtaatcaatcccataactgtgggaggctgaggcaggccgactacttgagcccaggaggtcaacaccagcctgggcaacatagtgaggctactctctacaaacttttttaaaaaaaattagccaagtgtggtggcatgcacctgtagtcccagctacttgggaggctgaggatcacttgagcctgagagtcaaggctgccataagctgaaattgcaccactgcactccagcctgggcaacagagctagactttgtctcaaaaacaaacaaacaaacaaaaaccaaaaagaaaaagaaaaagaggctccaaagtgtagaatcttaaatctaaaacttgtcactaaacctcctcattagttccacgtcacaagatggaatattttaagttccatcacgtgaaatcttatattccttttactctgtcaacttaaagtacacagattaatgtcctattatggctgtttcaggagagctaccaaaactgagggaggaattatgtgaccatgtaagaagttagatgacattatattcaacactaaagagtctatgcttctactaactgataaaattaccataatttcagtagaataaactactggatccaaagaaacataagtcatagccattccttttggtcccaaattcacaagcatggaaataacaactacaaagaatcaaaattataagaaaaatagttcagctgattttcaaaacattcacagaattatctaacatgtaggactagatgaccaatgccagagtttacatcttgctaatcatgagaaactcaacaattaacaaggcagcaagtaagtgaagaaacacacgagatccaattttgtctcaacagaagaactttcactctctgtccaggtaggtgacaaaaagtgataattcacacacattcaattcattctggtgcttatttttcaaatgttccatgcaaatttaccactcactgcatgcaaacagagaaaaaagaaaacccacaaagcacatgtaaaaattgcataaacatgacttaaagacattttgctatctatgaagctataaaccccacctgaaaattaaaaactgttatcacagatttagcactatgcaaaatatgaaagtgaaaacatgtaaaaataaaatggaaatgcagaatctagaaaatttaaaatatatattgctacccttcagtaaagaaagggagataatgtcatgttctcccaaactacagtgacttccctggtgaaaatgtaagtaggtatttcctttctggaggaaaacagtgaacatgtatcgaaagtcttaaaaacacgaataccgtgtgaatgagatcctacttgtggaaaataatttgacaattttacaaaaatgcattgtttctatatctgaaaaaaacatgtctaataaaagattacttaaatgaactgataataggtcacacaataaaataaaaactatcaagatttgaattcgacaaagaactgcctagtcttcctgatatatcactaactgacaaaagtcagttaaaaagtagcaggtgtaggatgaacccattgttatttcaaagcattaatagcattttctctggatgatgtgattaagtgagttttaaaacttcttccatcttttgatttcttatttattctttccatagtaaggatgctacttgcatattaaaaattaataactataaggggaaaacaatagcagttataaaacttcatatacatgatttgaatggccccgagatttactaaattgtctctgatttttaaaaaaattacaaaagtcaaaataccaaaatagatatttttaatgtgagcttttatactaaaataacctccccaaaacttgtcagatacatagtacttctttatatactacataggaggagagtgatcagcacaaacagaacgagactgaaaaatcagaagatctgcattaagtgtcatccttctgtccctaagcagctgtaggatcctagggaaacaattgtctgggcctcagttttcccagctttatgagtcccttcagttctaattttaaagttattttatgtaatagggaggtgagcaagaaactagtatttgctggatgcctgataacttattacacacactgcggggcactttgacatgggttatctcatttgaataccatgacattgaggattatcttcagtccacagccaaagagagaaatagaactggagtcaaatcacgaaaccaagatctcaaagaaagtacagaaccaagacaagaataggagtccaggagtctttcagcttcagagtctaagtcattttgactatattgttttgcagaaggtgattcatttcaaaataattattttttaacatgagtaatactgaagaattctatggaaaaaaatctcataactaatgtgcaactgggaaaaaaatctgaagaatcataacgtgaacctcacatttatgcatctatctggtaccacaaaggcagaccaagtttcttgaggaaatggaaccactatattctgcaaagttaatttctctctaatttgttgaggacctatgtgctatgcattttatagacattcccactttagaggggaataaaccttaacagttaagagctcgcattctgaggccagatgcccaagttcacataatggctctacctcttaattaactatgtgaccctgaatgaattacttgatctttctggacgtaagtttcctcgtaatttaaatggtagtatctacgagcattatcatggtgagagtattattcttcttcacattaccaattgtgagaaaattaaatgtgttaatatatataaagtgcttagaacattgcctggcacatactaagcactatgaaagtgttagctactactattattgttgtaattgttactatcaccctcacaagtgtatgagttagcactataaaccttcattctgctgatgctcagagaaattacataagtcatacatctaataagagatttgaactcagctactaaacttgagcttttaataactattaagaggaggatctgaaagtagccctctatatttgatctgcctttctgtgccaagtttaacaaatagcagctacactgatgagacaggactaaaggaagccatgccagaacctccaagttaatggtggaatcaactatattaagcattcttcttttttcctcactccaatgacaccttaatttatctgacctcatctgcatcactatctaatttaggatatgtaaaaggcatacaaaatttagagcacataaaagggcctctacgttggaaaagtatacactaataacgactttttggtatagttcctgcgcaagggaaatccttgtaccatatgggtcaccaaatcatagctcgtaagtcaaatcgagtccaccacctgtttatgtctctcaagcttagaatattttacatttttaaatggctggaaaaagtttgaaaaataataatagtttgtaacgtgaaaattataagaaattcaagttccagtatccatcaagtgtactggaacatacccaagttcattgatttataaatatactatatatgataatgctttggctctgtgtccccacccaaatctcatcttgaattgtactcccataattctcatgtgttgtaggagtgaccccctgggagataatctgaatcatgggggcagtttcccacatgctgttcttgtggtagtaagtctcacgagatctgatggttttatcaggggtttccgcttttgcatccttctcattttctcttgtcactgccatgcaagaagtgtctttcacctttcgccatgattctgaagccttcccagccatgtggaagtgtaagtccaattaaacttcttttttttttcccagtctcaggtacgtctttatcagcagcgtgaaaaaggactaatacaatatactatatagtttatggctgtttttcatactacaatggcagagttgagtactttaggcctgcaaaacctaaaacaaataccacctgccctttacagaaaatgtttgccaacccttagtttaggatctattatttatctctgccctccagtgaccctgccatctaatcatttggcctcttaactctctctttaccctgagcaaatccgtaaaataaaaggtatacctttccccaagtactattaaagaaaagaagaggagaggggaaaagggaaaaaggggaaaagaaagtgaggaaagggagaggatgcaaaagaaaaagaaggaaagaaaggaatttccctgatgagatcccttagtaataccttatcagctgttcataatcaaaattcctagaagaggaacaacagcttacttgctataatttcttcacattccattgacttttcttattactcaaaaaacaaagtatgttataatgtgttgatttttaaaataaaacaaacttttcttatttagtcagcaatgaaggtcaagtgagaccttctagtaaaagtcctctaaagtcagacacatgaaaatacttatccatttaaaacagacaatactttccaattatttatttctatgattgaattaatgggacagtgctacaaacagaagtcctatggaataagtcatacttggaagatcagagtttactctagacaacttgacagcaatcagtttaaaaatggtttcacctagagggatgtgtactaatgttagcaattaactttgaaaggcataaaaattaagatggattgatggatacaaggatggttatacgataaagcaatgtaagtattaatggcagaatctaggtggcaggcatatgtgtgtcagctgtaaaatttgtgttcaatgtttttttagttcccacatatcagtgagaacatgtgatatctgtctttccgtgtctggcttagttcactaaaaaaatgaatttacaagacaactggaatataagcaatgaatacaagcactaagaagatgaagccatagaaacagctgccagaaagtgaagatgtgacagtgaacgccaaacaagtaagattagaattacaattagaatcagaaatgacaaaaaagaaacatgaactgtgagatgcaatataaaaactaatggtgaacaaagcaaagaataaaaaataaaaacggaaagattaaaaggaaaatgtgactgtaagtagagtgacctttatattatacagaaggtaaagcagaatgaacatgtgaggaatctaaaaaacagatataaaatagaaacaactgaaggcttatataattagtctataaagctaggaaccactgcttagtaatttctcgtaagtggagtctctttgttctgagacgttgcaaaactccattccatctcaaagttatttttaatgttaaaatttgtaagagtgagcaacggtatcctaaatagttctaggccttgtagaaatagactgtaagagacatctgtgacacaactatattcagtatgatgtagggtctgttacaatgggatgaagtgaatttagattatttcaagactaaacctacaattgtgaactcattagtaccatgaaccgaacaaaaacctattaaatatagaacaagacgattttcatgaaaaaataaatatgaacaaatcagtattttcagttgtttgaaatataggttaaccttcaattactgttttatggccgggtgcagtggctcacgccacgcctctaatcccagcactttgggaggccgaggcaggcggatcatgaggtcaggagatcgagaccatcctggctaacatggtgaaactacgtccctactaaaaatacaaaaaaaaattagctgggcgccgtggtgggcgcctatagtcccagctacttgggaggctgatgcagaagaatggcatgaacccgggaggcggagcttgcagtgagccgagacagagccactgcactgtggcctgggcaaaagagcgagactctgtctcaaaaaaaaaaaagaaaagaaaagaactgtttttttcatttttatagtctcaatatccagaatgcgtgatatatgataaaaaaaaaagtaaaattgtagaactaaatatttacataattcatctgtaaaatgaaaatctgttttacagtgtcatatttcacagttagaaaggaagaaaaaccttaaatcaacaaattaactttacatcttatggaattaggaaatgaagaacaaatgagactcaaacttaccaaaaaataaaaaaaataaaaataaattacagctaaaataaaatagagaaaaatagaaaatttttgcaatagaaaaaaaatcaacaaaattaggagtagctgttttattgaaaagatcaacaaaactggcaaattcttagattaagaaatgaagagaatagacacaaacagcaacaactggaaattagaaaggcgatacaacaactgctgccacagaaataaataggaccttaaaagactaatatgaacaactatgacccaaaaaaatttgataacctttgagaacggatagacacatcaaacccaccaagactgagccacaaatacatacaacttctgaatggacctataactattagagattgaatcagtaactgtccaacaacgccagggcttcactgaaaactctaccaaacatttaaaaactaacaacccttctcaaactctttgaaaaaactagaggacagaacactttcaaaatcattttatgaggtaagcattacttagatatcgaaatcagacaaatttacaagaaaaaagaatccctaataaatactgatgcaaaaaaaatcaacaaaataccaagaaacagaattcaacaatgcattaaaaagattatatttcataaattctcaactggaatttattcataaaatccaaggatggttcaacatacaaaaaaatcactttaatacactgcattcttaggacaaaaaccaataatctcaactgactcagaagaagcatttgacaaaaatcaacacccttttaggatttaaaaaaaggccagacagggtggctcatgcctgtaatcccagcactttagaagggcaaggtgggtggatcacctgaggtcaggagtgtgagaccagcctggccaacacagtgaaaccctgtctctactaaaaatacaaaaactaatcgggcatggtggtgggcgcctgtaattccagctactcgggaggctgaggcaggacaatcacttgagaacccgggaggcggagctggcagtgaggtgagatagcatcattgcactccagcctgggtgacaagagcaagattctgtctcaaaaaaacaaaaacaaaaacgctcaattcgctagaaagatatggaaattacttcaacataatgaaggccatatatagaaagaccacagctaatgttattcaatgatgaaaaactgaaagttttccctctaagatcacaaatggaacaagaatgcacacattcaccacttctattcaacatactgttagacatcctgccagagttagcaactgggcaagaaaaagaaatgaaaggtattaaatgagaaaagtaagaagtaaaattacttctgttagcaaatgacatgatcttttatgttgaaaactctagcctaccaaaaagaaaaaaaaccgttagaataaaggaattcagtaaagttacaggatataaaaaccaatattaagaaaagagttgcatttctaaatactaaaaatgaagaatccaaaaaggaaattaattttttaaacccatttaaaatgaaatcaaagagtaaaaaatacttagggaatattttcaccaagcaaatgaaagacatgtacattgaaaattaaacaacataggccggacgtggtggctcacgcctgtaaccccagcagtttgggaggccaaggtgggctgatcacgaggtcaagagattgagaccatcctggccaacatggtgaaaccctgtctctactaaaaatacaaaataaattagctgggcttggtggcgcgcgcctgtaatcccagccactcgggaggctgaggcaggagttgtcacttgaatttgggaggcagaggtgcagtgagccaagatcacgccactctactccagcctggtgacagagtgagactctgtctcaaaaaaaaaaaaaaaagaaaaagaaaattatacaacaatgctgaaagaaattaaagacaatacaaataaatggaaagacatccaagtttatgaattggaagatttagtactgttaagatggcaatactacccaaagcaatctgcaaattcaaagcaatccctatcaaaatcccaatggcattttctacagaaacagaaaaaaaaaatcttaaaattaatacagaatcttgaaggaccctgaatagccgtaacaatctggacaaaaaacaaagctagaggcctcacattccctgatttctaaagatattgcaaagctatagtaatcaaaacactatggtgctggcataaagacagatatacagaccaagtgagcagaagagagaacacagaaatagggaaaagaggttcttcaacaaactgtattgggaaatctggaatctaacatgcaaaagaatgaagttggagccttatctcacaccatatacaaagatgaactcaagctggattacagacctaaacttaaaacatcgaattataaaactactacaagaaaacatggagaaaaagcttcatgacattggacttggcaatgatttcttgaatagatcaccaaaagcacaagcaaccaaagcaaaaatagacaaactggggatacataaactcaaaaatttctacaaagcaaacagtaaatggagtaaaatggcaacctacaaaacaggagaaaatatttctataccatgtatctgttatttggttaatatccagaatatataaataactcctacaattcaacaacaaaaaatctagttaaaaagtggacaaaggacttgaatagtcatttttccaaagaatatatacaaatgggcaataagcccatgaaaagattctcaccatcactgatcagtagggagaaatgtcaattaaaactgcaatgatacatcatctgaaaccattaggatggccaccattaaaaaaacagaaaataagtattggtgaagatatggagaaactggaacccttatgcaccactggtgaaaatgtaaaatggtgccaggcactgtggaaaacaacatgaaggtccctcaaaaaatttgaaatagaattacctccagttccacatatgaagagcttggaagtcaccactccatcctaacaacaagtaaaaaatgacaaacttaaaaataaacaaatctgagataggataagtgaggtcacagggcaaatgactgcctgtgagagcagagaacaggtgaacacatagcatcaccatttatctgagatgaaaaacacaagcagaaacctccacggggtaggaaatcctgaagtgtaatagacaaattgatgaaggctcagtgtggacaactctgaaagctaaaaactccagagttacccaattatagggggagccctacaattttctaagttttacatccaggcaattgaccagcttctcacagtaaatataggagaaaaatcctcaaccctcagcaggggaggcaaagagaaatgattttcaagtacactagactattccagtcttaacaaggtttgtcctcaggagaaactagttaaccagagcctaacctgctggggttgtagcaaagccaaaatgatgtgggggaagagaaataacccaacttcaggccattatagctatcttgttctaactaagggaatgagggaggggtgggattgagaaacacttgtgaagttcacagtccagaggcataagctcactaaaaagactgacctaatcataagactacagaactcttctcctctccctacaccttacaaccacattactaaatgctcatttacaacagttccttttacctagtacatcatgtccaagctatcaagaaaaaaattacagggcataataaaaggtaaaaaacaagcaccaggaccagatacagcagggatttggaattatcaaacttggaatctaaaacaactatgattaatatgctaagggccctaacgaactgagtaaacaacatgttaaaaaagtagagatgaaaatcctaagaaccaaaaggaagtgctagagataaaacacaaacaaaaacaaaaaacagaacactgtaagagaaatgaagaatgcctttgatgggcttattagtaggctgggcatggatgaagaatctctgagcttgaaaatatgccaaaaaactacatctgggcataaaacgttgtaattacagaaattcaaggataagaaaaaaatccgaagtaagccagagggaaaaaatcaccttacctgtagaggaaaaaaagaaaaaaaagaaaaaatacatgtgacttccaacaagaaaaagagtgaaatattcatagtgttgagagaaaaaaaaaccataaacctagcactctaccttgtgagattattattcaaaagttaaaaagaaacactttctcagacaaaaattaaggaaatttgttgtcagtacacctgccttgcaataagtgttgggaagttcagaaactgaaatctacatatatagagcatcaaaagaaggaaacactgaaagtaaaataaaaccttttatttttcttatacttaattgatctaacaaataagaatttgttcaaaataatgtcaacaattgtgcttatgcatacaaatgctcctaaacttacttattgggttgtgtcccaataccattataaattgaaaatatcatgaaaacacaacttatccaaatttgtgggatacagtgaaagcagcgcttagaaagaaacatacaacactgatgcatttattagaaaagaattatctaggccgggcgctgtggctcacgcctgtaatcccagcactttgggaggctgaggcgggtggatcacatggtcaggagatcaagaccatcctggctaacacagtgaaaccccgtctctactaaaaatacaaaaaaattagccacacgtggtggcaggcgcctgtagtcccagctacttgggaggctgaggcaagagaatggcgtgaacccgggaggcggagcttgcggtgagccgagatcgagccactgcactccagcctgggcgacaaagcgagactccatctcaaaaaaaaaagaaaagaaaagaatgatctaaaaatcaattatctgagctaccaacttatgaaactagaaaaagcaaattaaatccaaatagaagtaataaaaattagagcagaaatcaatgaaattgaaaacaagatatcaatagagaaaaatcaaagaaatcaactagttctctgaaaagatcaataaaatcaataagcctctagccaggctaagaaaaagagacaaaggacaaaataactaatatcagaatgaaaagagtggacatcattacagatctcatggacattaaaaggataatcaagggatattatgaacaactttacggccacgaatttggtaacctagatgaaatgaatcaattccttaaaagacacaatctattagaactctaagaagaaataatcttgattaaaaagcatatattaaagaaattaaatccataattaataatgttctaaaagagaaggcatcaggcccagatggattctctgatgaattctactaaacatttaaggaagaaaccacaccagttctctacaatctccttcagaagacagaagcaaaggagatgctcctatctcattgtatgaagtcagcattactctaatacccaaaccagacaaagacattatcagaaaagaaaactacagacccatatttgtcatgaacaaagatgcaaaaatctttgtattagcaaagtattagcaaactaaattttactacaatgtataaaaagaagtatacaccagcacaaagtaggatttatcccaggtatgcaagactggttcaatattggaaaatcaattaatgcaattcaccatatcaacagactaaagaagaaaaatcacatgaccataccatagatggagagaagtatgtgacaaaatttaacacccactcatgatagaaactagtaaactaggaatagagggaacaccttcaacttgataaagaacgtttacaaaaaacatacagctaacaccatccttaatgatgagaaactagaaactttcttactaagatcaggaacaagaaaagaatatccccacctcaccactccatactggaagtcctagctaagacaagaaaaggaaataaagggtatactaacggggaacaaaaaaatacaactgcctttgtttgcagatgaaatgactatatgtgtagaacatagacaggaattgaaaaaaagaaaaagaaaaacaacaaaaacctcctagaactaataagtgattatagcaaagctgcaggatacaaggttcatataaaaaagttaatagctttcctgtaaaccagcaatgcataagttgaatttgaaattaaaaacacaataccattttacattagcgtgtcccaaaatgaaatatttaagtacagatctaacaaaattagtacaagatatatgaggaaaaatgttttagaactctgatgaaagaaatcaaataactaaataatgaagagctattccatgacccgtgagagacaactcaatattgacagaaaaagtcagatggacactactgatttcaagatttactgtaaagctacagtagtcaagatggtgtggtactgacaaaagaactgacaaaacagaccaacgaaacagaatagagagcccagaaatggacccacatagtcaaaggagcaatggcagtatttgacaaagaggcaaaggcaatacaatgaagaaaatagtctttttcaataaacagtggtaataactgaacatccacatgcaaaaaaaaaaagagtctagacacaggtcttacacccttcacaaaaataaactcaaaataaaccagagaattaaatgtaaaactcaaaactataaaactcctagaggataacataagaaaaaatctagatcttgggtttggtgatgacttttagatacggcaccaaaggtaccaaccatgaagaaaagaactgataagccagacttcattaaaattgtctacttgtttcttaaaaattgttgtcttttgcaaaagacaatgtcaagagtatgaaaagacaagccacagatagggaggaaatatttacataagacacatctgataaagaactattaactaaaatgtgtaaggaggctgggtgtggtggctcacatcccagcactttgggaggccaaggtgggtggatcacctgaggtcaggaggtcgagaccagcctggctaacatagtgaaaccccgtgtctactaaaaatacaaaaattagccaggtgtggtggtgcacgggtataatcccagctactcgggaggctgacgcaggagaatcacttgaacccaggtggcagaggttgcagggagccaagactgtgccactgtactgcaacctgggtgacagagcgaggctctgtctcaacagacagacagacagacagacaagacagacagagacagtgtaaggaactcttaaaattccacaagaaaacaaacaacccaattaaaaaattggccaacaaccttaacagacacctcaccaaagatatacagatggcaattcagcatatgaaaagatgtcccacacatcatatggcatcagagaaacacaaattaaaattataagatacctctacacacctatcagaatggacaaaattcagaacactgataacaccaaatactggtgaagatgtagagcaaaagaaacactcactcattgctggtgaaaaatgtaaaaggatagcgtcatattagaagacagtttggatgtttcctacaaaactaaacacttttaccataagatccagcaattgcactccctagtatttacagaaagtcgctgaaaacctaagtccacacaaaaacctgcacaccgatatctacagcagttttattcataattagcaaaatgtggaagcaaccacaatgtccttcattaggtgaatattcattcacaaactgtgatatgtccagaaaatggaaaaagagaggtactaacaacctatgaaaagacatggaagaaactttaatgcatattagtaagtaaaaatagtcaagctgaaagggctatatactgtatgattacaagtatataatatgctggaaaaggcaaagttagagacacagtaaaaggatcggtgattgccaaggagtgggagggaaggaaagataaataggcagaacacagaggattttggggcagtgaaaacattctgtatgatataatggtagatacatgtcattgtactttgttcaaagccacagaacgtacagcactaagaatgatccctaatataaactacggactttgggtaattatgatgtatcaatataggttcatcagaaagacatgtaccactctggtgggagatgcacactggctatgagagaatccatacatgtgtgtggaaggaggtacaggggaaatctctgtaccttcctctcaattctgtgaacctagaactcctgtaaaaaaaaaaaaaatctaaaaaaaaatagaatacatatgatccagtaatcctacacctgggtatacttccaaatatattaaaaacaggttctcaaaaaaatatttgtatacccatgtttatttcaacattacaatattcaagaagtggaaggaacctaaacatccatcaacaaatggttaaagaaaatgtggtatacatatataacaaaatgttattcagcctaaaagaaaagaaagaaattctgtaatatgctacaacacaaatgaaccttgaggacattgctatgtgaaataggccagtcaacaaaagacaaatacttaatgattccactgacatgaagtagccaaaacagtcaaattttagaggcaaaaagtagaatggcatttgccaaggaataggaagaagggggaaaagaagagttgttcaatgaatgtagagtttctgttttacaagatgaaaaagttctagagatctgctgcacaacaatgtgcacagttaccacaattgtaccgtacacttcaaatcattaatatggtaaaatgtgttgtttttgacaatttttaaaactctaccccattgttttctttacctcttatataaactgataaaaacctgttttatcttaatcaattattgtatgactactgctccccagagaaaaaagtgcatgtgaaatactactacttatccatctcctggctctgagcagtacatgtcaggaacaagagggaattgtagctggaagacagtagaagagccataggacaagtctctaagagaaggaagaaaaggcgcaatgaaagaaaacaagtttaagatagtagaaaagcattcaaagacggcaacctgaggtaaggtgttttcactgaagcttttggggtaaaacagttttgagttggcatgcctgtagacatgggaagcagcagtgatgcagaggtgaacattactgtagataaaaacggatgggaatttgacttgctagggactgaggggttaatcatataaataaagatggcagcagatttgggaaagagtgaagaagaataagttcaggtagcagtcctcaaaaaccgagaagaaactgatagctcactgaaggcagacagaggaagacaaaaccagaaggcataagcttcaaaggagcagggatttttatgctgagagagtaaaaggaatagttcaaagcagcagtggagaacacgaataacgttccatgtgggaaaagaacatgtccagagcttactgtacctataacctagcttctgtaactggaaatgaagaatctgctctagtcaggtcatcacttttcactacttattttacttggccttcctaagaaatatagaccttttggaaattattgacttttgggtctaggacactatttcttggtttcctcccttctctctggctgtttttcagagacttcccttccaaatctagagacatttgtattctccagggatcagctattagatactttcccttttaaatttccctttggacagtttcatctttcaaggattgagcaataactaaatgacttccaaatgtctacttcagtataaattctgcttgtcaggctacataaaaagggctcttcaaggaattatgatgtctaaagaaagagaaagccacgatttcaatatcacagagatgactacagaggaatagcaataaaaagagaggcaacttaggagaggtgaatcacaaaagatgactaggagctgatgacactatgggtgggaagaatgtttcagacaggggaagaatgtttcagatagaggaaaatgagtaaaagcacaggggcctgaaaacatgatattataagacaattccaagcacttcaagagcctaaagttcaagaaaagtttcaaaaatatgaaaatggagaggcagggaaaagccagatcatggaagacctcaatagccatgataagtaattctttttttagccaaaagaggagtaatctaataaaagctaaagatcttctcctcataaaaatacatgcacacttcaggagtgcaaatgcactcttccggaagattcgtaacccactacattcataaaccattagataagaactaaaacacaaggagtcactgaagggttttaagcaggttaagtgactgacaaaatttgccttttcaataactgaaaccaaagtgggcaaaactggaggcaagcaatccagttaggtaatgactactgtaatagtccggacaaataatgtagcagtaggaagaaaaaaaaagatgaaattgacccaggaaatatttaaaataagtagtttgtaagaggtaaataagctggaagagccagaggtaatgggtagggtttctggtatgggcaacaagatatgctacaagctgagatgttagtaaaaacaagcgttcatcagcatttagtaagtgatttatttatattatatcactgaatactcaattatgttaagaggcagacagcagttaaaaaacaaagaactcggtgaatcaaaaagttctgctaatttggggaaatagcatcccttttatttttgttaatctcttttgggtttgatcctcatttatagctgacaagaagttctatgtactaaaggtaaactattctcattaatgttcccaaaaatctcttggaataattaagatataaagaaattcaaaattcacatgattataaaaatctttccttagataatctcataatatagccatgttttgctcattctactttgagaagattcagccagaaacagttcatccattcaactatccctactgtgaactagaagtatgtttccttacatttgaaacagaagatataggtttatatgatgcttcaggtggtagaaaagcagggcagactatgactcgtgtcacttccttccacacgtgatgcctttcatgggctcctgtgtctgtcagaagaaagcaaagggccttagcgtgctcctggctttctatatccaaatgcattttttcacaccttctcccatcagctaactctacattactgcaatacggaacttcttactactcagtggacttgttctgctgtcttctctgattccaggtgttattcttcctgcctagaacactatgattcttagctattcccaagcatcctcaaggtttcagcttatataccacttttaagataattaggtattcttcctctgtagtctcataccaaccagtacctattctattatatataataactgcctattaattaaatgggaagctgaggtatatgacctaataacttatttactgtcgtatcctcagaacctagcaaattacagagtctcaacagagatttttcaatttctcttctgatactgtctcgataacagtgtcaattaaacctttctctaattatttgaccttgaagggaaatagatgtcagactacctcctggtttcgagtatactggaagcatacaaaaggaccttctcaatctggagaccaagaatatgatatgagaacctataggagaaccacttatttgattaaagagatttcttttacttcagaaaatatttcagtatgttacttgacccataaatgcttatagatgtgtaagtacaccgaagaagtcatataggaaataaaagcatccaagctatatttctatggtctactctgattaaaaagctcagctctcctatcaaattcaagataatgcatgtggattatggagcacagtcacttgctacatggtaaatgctcaaaaagatgataggtggtattacccacattctacaggctgtgtacatacttatcagtttatatatatacataaactgatcctaaaaaattcttcctacatttctgcaagataattaaaaaggcagaaacaaacattttgcataaatttactagcttcattctttcatgtaggaagtagttactgactacctactgtatgccaggcactgtcattaggcttccattctagtggtaaagaagcaaaacaacaaagaaatcaatatgcaagaagtcaaatgacattaaatcccatgaagaaaaatgcagcaagttaaggggaatgcagaagaacatgatcattctttgatgcagccggtcaggaaaagcatcatttgagcagagagctctctgaatcaagtgaggaaggaagccacatggattatcacagagaagggtcacagggtcacagacaatagttacaagccttaagatgacaaagatacagccattttagacagagatgagcaagtgcggtagagagatcacagaaatgaaaggaagccagttcacacagggccatgtaaatctccagattttacttttaagatgggaagcctctgaaaagttctgtgcatagtaaataacatggtttaactcagattttaaaaagatcattccggctgctactagagaatacactgtaaagcacaagactcctgggaaacaatttctttcttttgccaaaagatgatgcctttaaacagagtaaacagaagtataatggttaaaaaaaataaaatgaattatgggtatttggaaggtgtagccaacaagatttaccaataatttgagtatgtgacatagagaaattaaaagatgcttccaaggcttctggctgcacaggaggggaaaaaagctgttattgactgagatggcaaaatattatgagagacgtaggtttgggatgatgaaaatcaggagctccacttaggacaggttaagtttgagaaccagacttaactgttggataaatcagtctacagttcagagggcaagagctgacgatggaaatagaagagttgtcaatagacagagtcctggggcatttctgacatttacagtaaactgagcatttattaaaactaacttgctttactgaaccataaatcacttgttgtatttacccctgctccatttatagttatacatctggaaacatagccttagtgttagaggtaaagagtaaataccaaacataaaaaatctgatctggttgggtgcggtggctcaagcctgtaatcccagcgctctggaaggccgaggcaggcagatcacgaggtcaggagttcaagaccagcctggccaatatggtgaaactctgtctctactaaaaatacaaaattagccaggcatggtggcacatgcctgtaatctcagctactcgggtggctgaggcaggagaattgcttcatcctgggaggcaggggttgcagtgagccaaattgcgccactgcactccagcctgggtgacagagcaagattccatctcaaaaaaaaaatctgaagttactgagaaactggtatgaaatcattaagaaaactaaggtgtctaaattaatacatacaaagagattctacaacacggtatttataaatttaaacaaaatccatggccaggcacggtggctcacgtctgtagtcccagcactttgtgaggccaaggcagaaggattactttggggccaagagttcaagaccagcctgggcaacatagtgagaccctgtctctacaaaaaacaaacaaacaaacaaaaacactgttttagcctggcatggtggcacatgcctgtagtcccagctactcaggaggctgaggcatgaggatcacttgagcccaggaattcaaagttgtagtgagctctgatcacaccactgcactctagctgtatcacttatgacagagcaagacaatatctcaaacaacaagcaaacaaaacaaaaaactaaagtaaatccaggtaaaataaacatacgaataaatgaaaagatctgggttattgcattagttctgtttctaggcttaactacaaaatggtgtccagttgttaaaaacacttgtttaagagtattaataatttttttttttactatgctcttctacatcctaggaaattggcaacactaagaattcctaaaaacaaacaggagtgttaactgtatataaattattatttaagatgcattcaaggcgttacttaaaatatcaaatgcatgtcaaagtacaaacaacaaaatcatgcttcaacaaatgtgggatgttgccattaatggacagttagctctgaggtaaaaccaagaatccttcattacctatttttgtaaattaggacaaatactattaaggtattaggttggtacaaaagtaattgaacaaacctggacccactcacctcactgaaagtgctgcctggctacagtttctagatataggaatgtgagaaatggtagcagccttgaaggtttagagctatattcccataccaattatggctagaaacttaaaacagctctattgagacattatgggaagtctaatttcctgttactctactttaacacagccaagtaaaacagtaagaaagcttgcttaattcaacaaggactgagtgccagagtgtcacctggaaacttgtgacaaataatcatgcctcacacattcatccttggtttttactaccaaatgcaagcttcatctatcctcttccattctaaacttgactcatcctcctaacctcttccagaaagatctctagaaacccagaggctttctgaagacccataggctatcccccatcttcaactactttacataatggcccctcaacttcttagctttcatgaaagcctggctcctccccaaaggcactgcctatcatgcaacccttttatgtgactcctaaaactcctaagtccaccattattcttctaattccctgtattaaaaataaacggcaaaattccctgtattaaaaacaacaaaaaaacagcttgtaatttgaaactcatgtcatctaaccgaatgccttctctttccctccctgttctggtcaattaaacccacatatttaagcctccactttgcccccagttacatcatcagcaaagtgacttcaatgtccctgtacatggttctatcccaatactctaggcccccaaaatatttgcctttctaaatttgagacatcttcacctcctcatttcagcaaatcactcccttgtctttgttagacatactaaaacctctgacaatgatcatctcagctatctttgtaagagtttcactcatactcatatctcctttcacctgtcaagacaccaggtttggtgacaaataaaaatgatacgtatttgggaggctgaggcaggagaatcatttgaacccaggaagcagaggatgcagtggccaagatcatgctactacactccagcctgggtgacaaagcaagactctgtctcaaaaaaaaaaaaaaaaaaaaaaaacacaaaaaacaaaaaaaaggatacatatttattgtattcacatgatgttccaaaatatgtatacactgtggaatggctagatcaagctaattaatacatgcaatacctcacatacttatattttatggcagaacatttaaaatctactctcagtgatttccaaaaatacactgttattaactagtttccatgttgtacaatagataccttgaacaaattcctcttaattgaaattttgtgtcctctgaccaacacctctgcaacccagtccactcacccccagcccctggtaaccaccattttacatccctgagttaagattccacatttaagagagatgtagtatttgcctttctgtggctggcttactttcaacaatgccctccaggttcatccctgctgtcacaaatgacagcatttcctcctttttatggctgaagtatattccactgtgtatacataccacattttctttatccatgaacacttaggctgatgctgtatcatgggtattgcaaatgataccgaaaggaacatgggagtacagatctcttcagcgcactgattttattcttttatttatatatatatatatatatatatatatatatatatatatatataaaaatacatatatatccaagtgtgactgctgaatcatatggtagttctattttttaatttctgagcaaacgtcatgctattttccataaatgctgtactaatttacattcctgccatgcgcaatatatctcttgtctgcaaatcctcatcatactttaatagccattctaatggccatttgtatgtcttattttgagaaatgtctattcaagtcctttgcccatttcttaagtgaggtgctttcttactattgagatgtctgagttccttatatattttgcatattaaccccttaccagatatatggtttggaaatactatcttccattctgtgagttttttcattctgtagattttttctttttgccatgcagaagctttttagtttgatgtgatctcattcatcaatttttatttttgttgcctgtgcttcgagggggtcatatccaaaaaaatcactgtccaaaccaatgtcatgtacatttctcctatactttattctggtagttctacagtttcaggtcttatatttaagaccttaatccattttaacttgaatttggtatatgatgtgagatacaggtctgatttcattctcatgcatgtagatattccattttcccaacaccacctattgaacagacttccctttccccgctgtgttctttgcaccctgtccaaaatcaactgatagtacacgaatttatttctgtgctctccattctgttttgtgggtcgatgtgtctgtttttttgtttcttttgtttttaaaagacagggtctcacgctgtcatccaggctggagtgcagtgatgcaatcacagttcactgccaccttaagctcctgagctcaagcaatcctccttcttcagcctctcgggtagctaggactacagatacacagcaccgcgcctggctttaaaaattttttttttttttaattttagagacagggtctcactatgttgcccaggctgctctcgaactcctggtttcaagtaatccttctgcctcagtctcccagagtgtgggaatacacgtgtgagcaactgtgcctggcctgtctacttctatgtgactatcatgctgttataattactgtagctttgaactatattttgaaatcagatagtgtgatgtctccagctttgttcttttcactcatgacagctttggctatttaggatcttatgtggttccatataaattttagcactgttttctagttctgtgaaatttaacattggaattttgatcaggattgcattaaaactgcagattgctttggataataaaaacattttacaatattaattcttccaatccataaacacaagataactttccattatttgtatcatcttcaatttctttaatcaatgttacatagttttcaactctttggttaaagttatttctaagtacaatcatccctcggtatctgcaggatattggttccaggatctcctgtagataccaaaatccatggatgctcaagtccattatataaaatggtatagtatttgcatacaacctacacacatcctcgtgtatactttaaatcattacttagtacctaatacaacgtaaatgctatgtaaatagttgctatactgtagtttccttattgtataagaaaacagtatttttattgttgtatttttttctcaaatattttcatccaaatgttggttcaatttgcaaatgcagaaccactgatactgggagccactgcatgttttgtttttggtacctattatacatggaattgtcttcttgatttttcttttagataatttgtcattaatgtacagaaattctacggatttttgtatcttgattttatatcttacaactttactgaatttatcagttctaacaattctctggtggagtctttaggtttttctatatacaagatcatgtcatcttcaaacagggacaacaatgtcttcctttcctactgggatgccttttctttctcttgcctaattgctcttgcaaggacttccggtactgtgctgaatagaaatggcaaaagtgggcattctcgttttcttcctgatctcaaaagaaaagcttttaacttttcaacattcagtataacgttagcagtgtgtttgtcaatatggcctttattttatagaggtacattccttctatacttaattttttaaaattttgtagcacaagagaatactgaattctgtcaaatgctttttctcaattatctcaattatctattgaaatgataacatggttttggcctttgttctcctaatgttgtatatcacattttatggattcaggtctgttggataatccttgtacccttgaggtaaatcccatatgatcacagtaaatgatccttctaatacactgttgaatttagttattattttcttcagaatttctgcatctaaattaagaatacgggtctgtaattttcttttcctggagagttcttgtctggctttggtatctaggtaatgctcatctcccaaaatgagtttgaaattactccctcttcttaaatttctcataaaattatgagaacaatctgtactagttcttctttaaatgtctgctagaattcagcagtaaagtcaccaagtcttgggcttcctttggtgggagatatttttatgactgatacaatccttgtcactggactgttcacatttttcatttcatgattaagcttggacaagttgcatgtgtctaggaatttatccatttcttctatggtaatcaatttgttggcatataattgttcagtctcttatgatcctcttatttcttgtacttctctggtatcagctgcaatggttcctctttcatttctgatttaacttgagtcatctctttttttcttagtctagctaaagacttgttgcttttatcatcaaaaaacacaactctttattttttttatcttgagtcatctcttttttccttagtctagccaaataacctgtcttttgagttcagattcttttgtctgcttgctcaattctgcttttaatgctcttttgcatttttcattccatttattgcattttcagcttcagaatttgttaaaaaataatttcaatctcaaaatttctcattttgattgctgttttcctgattttgttgaattgtttatctgcattttcttgaaattcattgagcttccttaaacaattactttgaattctttgtcaggcagttcatatatctccatttctttatggttggttcaggtgccttattgtgttcctttgactggtgtcacgtttccctgactgttcttgatccctgtagtcatgtgttggcacctgcacatttgaagaagctgagacttgttccagtctttgcagagtgactttattgggtaaagcccttcaccagtcagcctgtccagagattatgcagcctgagtctaccggggctggcctggagtctgggtcagcagggtaggtcctggagccttggtacacaggtgctgctggcctggcatcctggtctactagagtgagcctgaaccttggatctgcaaggaccagtgtgaaggctgggtaggtggatgttggcctagaatttggatcacaaggggctggccaagtactgggtttggacccttgttctgcagtgatgtgaggccacaggggccgatctagagggcagggctgcagggaccaccctagcactagacaggcttagagcctagggctgtgggatccagcttggtgctggggtgggcctccaagcttggtttgtgggtattggcctgaagtttggggccatgggggcctgcctagcattgagttttactggggcgagctcaatgttagggtctaagtctggtgtacacttcccctccttcccccaggtgaacagtctctctctccatgctgggatctcagggactgagggaggtgtgacacaagtaatgtaaaactgtccttcttacccttttcaatgtgtcttttcttatctgtgtgccacattcaggtaatctctcgtctggtttcttagctcttatatttttgtgtgtagacagttgttcaaattgatggttctacaatgagatgagtgctgcaaagtgctagtctgccatcttgctgttatctagacctcaggcttttcttaaaacaactcaacactttggtctggcatcccaacctttccaatcatggccatcatccacagcatataaattcaaatactccaatgttaacatcttatgcacatgccactaatgattctgttccatcagctctgctaatatccaaccctaaaataccatgcataatcttctggctattggagaaaagtctttaaatttcaaatgtgataaagtctttaatcttaactagtcactcagtggaatgagattctcctactctgatacggtttctgatttcaggtagccagccagtcaagactctcaacttctgatccacttcttcacccattcccctcagtagcttcctaagttttcagtcttctcaaaacctctaaacaaaccttgtattccacaaaatattattaaaaaatgtttcataaaaagtttcgtggtcactaacctacagtaacatactaccttatatccactacaatgactactattgaagtacacacacacacacactctcacacaatatgtgatggcaaggatgtagagaaactggaccccttgtgcactagtggtagaaacgcaaataggtacagttgctctggaagagtatggcagtttctcaaaattttaaaaataaaattaccatatgatccaacaattccacttctgggaaaacaattcaaagcagggtctcaaaaagatatttgtacactcctgttcatagcaacattatctgtaatagctacaacatggaagcaacctgagcgctcatcaacaggtaaatggataagcaaaatgtggtatatacatacaataaaacattattcagcctgaaaaaggatgcaaattttgaaacatgctaaagatggatgaaacttgatgacactgcgaagtaaaataagccaatcataaaagggcaaaaactgtatgattgcacttatagggggtacttagagcagtcaaaattagacacaaagtagaataatggttgtcagaggctgtgaagataaggaaatgaggaattattgtttaatgggtacagagtttcagttctgcaaaacagagagttctgatcgtgactgtgcaacaatattaatatacttaataccattgagccaaatacttaaaaatggtgaaatggaaaattttacattatgtgtattttactacaattttttaaagcttaaaagacaagtcacatggttgggtcacataaatttgagaaatacattttatagtcgtttcttgcagattcacaatatataccggcatttaaataaggttccaatattttcagtaaaaaaatcttgatttttccaccctcacccacaattacaattaatatcacacatccatctttacttccttgttctaatttcattagatgggcatctttcctcttattcaaggtcaatcactatatctgcatttttctttttttatattacctgtatgagagatacacctgtatttttcattccaacccttaatacctcgaaaaactttgctttgataattactacctctattatctgaaacatctttagtcttcacaataaatcactaaagtcttacttacttcatgtcctaaatatttgtcttaaatccagaaaaatttattttgaattcctattataccactgtcattgtcaaggctctcactgactgaactaccttaccaccacacgtttctcttcaatcctttctctcttgcaaggttattaaaaatacacgtttgacaaacttactatctacctactgagcaaattctttgctgactccctaataccttctatcacatcttatcttcttcattttcctacctctcagctagtttatgatctaaaagtcctcaactgcctattgtcccctactccctatgctgcttctaactttggctcatacttctgcctggaataagccgctcatgcttctagctgcctgattcccagtcacatttcaagactgaacttagcatttcctggccactcttacttccctgccatctacactagattcctattgcatacctgggtactccagtactccttcatgttactattgtattttggataccattctacctcagtgactgaaattatttgcttctgcatctttcactcttgagtataatataaatttctgtagggtgaaaactaattattacgcatctctgtatctataacatagtacttgatgccttaaatatggtaggcgttgagactgttaaactcaactctttcctcaacctccctatttccctacaactgctaccagggaagcaaaaagactaagaatttaggcgtgtgcatttatctatctagtagtagaaacctagtaaactgttaccgaggtttagagttatctgataggaaaaaaagtaggtatgttcctatctcccatttactgctaaatgattcctttcttttaaccagaaattatttccaaataatgtgacgtaatttaaagcagtctagggcaactcaaaataagaaccacagtctcaaccaagttacacttacattcggctagcttcaatgtcgtcagactgaggttctcctgatctgtaaaatgcaattgagaaacagttagcaaaatattccatattccaaaaaaaaaggtagacatattacttaggaagacaattttgtaaacaagatttaagcactaaataaaacagttttaaaattaaagatgtcaacatgaaagaaagtggtcagatcaggtggccatacaacacatttattttaagggttggactattaaaaaactcaatgcatgttttttaaaggaaactgtaaacgctatacatagataccaacagacaagccattataagccataattattcacaaagtcaaatacgtgtaataaaacacacaactaaaaaacttcctatagccaagtattggttatccacattaacaaaggtactcactggtattcactcacagtattaaactttagattagtggctcagtaaactactccctaggcagacagactaaagcttaggccagccatgtagttttgtaaatgaagttttattgggatgcagccatactcattcatttaggtatcatctatggctgctttcacactaaaagaacagagctgaggacttgtggcagaaaccacatggcccataaagcctaaaatatttattttctggccctttaagaacaaatgtgccaaccgctaccgctactccagacaattcaaactaaaatctaataccttggtaagtttaaagacacttaaatcagatacaacattctaatgatgattatcttggttcaacaatgaaactgtttccctaaaaatacacttactgtatgtattacctgtcaaaagtgtatcacctgaggtgaagttttgcactggatagctgtgaattaacttcagttttaaacagttgccagttactttgttatttctaaatatactactgctctctcatgtagaaatatttaaaattctaagtcactaaaaagcctttcattttcatttcacgagatatgaatcagtatttccctatctattcacttttataaacagcatcagcaacaatgaatgagtcaatataatattgatttctaacacttagaaattcccaaactagataaaaaatgttttttgaggtcaaaagctaaattttcaaattggcattacaaagtcctgatttgtgaacttctcactgactttaggcttccaactttaagcaactctaacaagaatcttaaaatcagtcacacacacacacacacacacacacacgcacacacacaaacctgttttctaaatttcttagctaaaaacaaaaacaaaaacaaaaaacaacccctcacttctttatcagactctcaaaattaccctcactgcaattcattcagattccaaggacaagaatggaaaaggaaaaaaaaaaaaaaaaaagactccagcagctcaaatatttattttagatcttctttgcaatgtatttaaattttcaattttgcacaaaattacataacaactaaaaactggggcatgctggaggtggcagtgacttggctgtgacacaaatgcaaaaatttcactccaccctctcccccagggagcaagcaaatcacctatgtgacacacctggtctccaccagccttgtgggtaagtaccccaagattgcttccaaacttgtatctcccagacagaagagctaaaaattgatgataaccccatgtaccagctgactcatttttgaaagtgcgaccctccagcatcagatgtcatactgtaaggaggcagagctggcttgcaaaacaaaaaataaacctgctggcactgagggaagagaggcagattagaagttttcaaacacgtaggcagcaaaactttcaaaattaacagggaaagagaagagagggaaaaaatgaggacatgatgataggaaaataaaaatattactgcaaaaaggtaagacacaagaagaaaaacaaatctaagtcttagaagtacaatatgtaactgttacaaagttttgagatcctgaaatgggatagagtttaaatacattatcaaatgataactacatctatcttcccaatttctgttccctaagcaagagaatatgtgaactttggcatcaaaatgtttgccaccaaactgtaacatattaattactactttttacatatattaaagtaggctattaaaaaccattgataagacaagctaagtaatttaaaccaatccagtatagaagaagaaggattgaaagattattaccttaaaataaatctgtcctgggtctattaaacatagcaaagttgttctactcaaattggaaattgttttttaatcaagagaaaaatgaatatatgcagaactagcagacatttttcttgcagtaatttataatagtttctgtctgaatgaatttctactcatcctaataacagtatatttctagaatattataaataagttaccaaagtcccgaggttagaattcaaactctcaaaactatgacatatgccaggtgtggtagttcatgtctgtaatctcagcactttgggaggtcaagacataaggaccacttgagctcaggagttcaaggtcaacctgggcaacatgatgaaacctcgtctcttagccgggtgtggtggtgggtgcctttagtcccagcaacttgggaggctgaggtgggagggtcacttgagcccagaaggtcaaagttgcagtgaactgtgatcgtgccactgcactccagcctgggcgatggagtgagaccttgtcttggaaacaaacataaactatgaaatatataccacctagcaacagttcccaagcttgactttggctcctaaagagtctacttattcttttactgccaagttgctggaagtaagaatcctgtatgtgcttgtaaatgcagaacatataacctaattcaaaacatataaccaaagggaaatttttgtattaaactattgacttaggttatcctaaagtgtgtcagaataacaagtcagaaattttaaaactgaaacaataaccaaataacattggataataaaatgtaaatctcagaatgagaatcaattttaggtcttgatttgaatcgcagaaaatatgatcacaaaacacccactaatctgaatactgcagcatgagctagcaaattcaaatggtggctcacttccaataacactggtgcagcttctccatcctgcaagccactccttttacctccactgtaactctctaggagagaaaagtatactagttttattaatgttataaaaacttctagagaaatgtttagttaaaacgttcaccacataaaaggcatactttaaaatgcatattaagaaatttttaatgttttctataatgtttatagtaaaatgtttaaaaccttgaagtttttttgagaaatactttcctgtttatacatacagataggtctttgatagtggctactgatatttttaatgagaaaaaaagacactaaaatattttaaggagattaaatgaagtaggtcaactctcaggcccactattcttagcagtattcctgccaactatacattgtcttcatttttacagtatgtatttcactttacaatgacagccttttaaaggctgtaaaataattcaaaattaccttttacaagctgtggccattcggtgacatcagggtgatcacagctttgagtcactgattaaaaacaggttgtcacaccagtctagctgctaccttgatctgagcgtaggcttaataactctaataaattaaacaaacctttggttagaacactttaatatataaacccaattcattgttcaaaaaataatattcaaagcttcaaattaggtgtcaatgtaaaattcatcagaagagtaattattatagaaaagtttttaaggactattttccagcattttgtttttcttaaatgatctcttcatttgagaaaatgtaataattccttgtacttttatgtaatgttatagtttctgaagcattttggtcaatagtaccttgagtcttataacaactttggctttacctaatcaagacagataatatactaagaattaaaaaaaaaaaaaattaagcagcctccgagtgattaactgacttgcccaagattttggaactagtgttgaaggactgactaaaacccagatatactgacttcctatcaagggatggatttttttgtttgttttggcttagttttgctatactgggtttcaagatttaagtatatgtaaatgagtaaagattcagaacacagattgagatctttcaaatacggacaaattcagtcaaaagattcctaagctgatagagcaatcagtcaccaaggagggcaactgcttaatggaatagttatatacatacacataaacacacacacataaacacaaagtctagtcccactaattctgtatgtacgtaaagtcatttaacatcagtcaccgcatgttctcactcacaggtgggaactgaacaatgagaacacatggacacaggaaggggaacatcacactctggggactgttgtggggtggggggaaggggagggatagcattaggaaatatacctaatgctaaatgacgagttaatgggtgcagcacaccagcatggcacatgtatacatatgtaactaacctgcacattgtgcacatgtaccctaaaacttaaagtataataataataaaaaacatcagtcaaaaccccttaagtactgcataaaaatatattctactctttcttggccataaatctactaagatttaatttcatgaaaaagtatggcaaaagatgaaagcatatcctcctccctcaaccaaatatctttttaaccccttacatggccttagctgaacttttctgattgtcacagttcaaatttagcaggcctctttactgacactgtagttctggcaaagataccatacatctgaaatatcccagtatcaaaagatcattttgtgcaactagttctttcccctcacgattcccctatccaggccaaatctgaggcatcaactacggaaagatgaggaaattaggaggaagaaacctttcataattaacatcctcaaagcaacaatagtcaagcgtaaaaggtggttaccagtgtggattcagaacccaatataaaacagcaaggtatctgcgaataccaacggttaaaacatgaatgtttgagcccatacctatgcagctatgaacgcagggcttcaaaatccagattaggtgaggattggcctgaatatataaaaataattgcaggggattccaataaatgggatttatagtatctgtaagaaataacgcaatctcccagatactcctatcctaactatacattgcctaataagaacttagacattgctgaggtcatatgggaaacaccaccttccctaaaataaacaatgtggtcatgatacagcttccccttgggttctcaagagactaatggtatgtggaattagaagattcaaacaagtctaactttccatcttgtaaacacaaaaataataaagttaaaatatcttttaattgactaattgacctcaatgtaattaaagagctatatgtattttgaaaactagagtcaagtcctctcttccagtcccctcttttatgagatccggtgctcaaaaggctccaaggccaggctggacttatgtctctgtttggtcattcactagctgagaaatcttgggcaagttacttaacctctccgagtctcagtttccttataggtagaactaggataatagtacctattccatagagctgtcatggataaacaagctaacatctaagtatctcagaacagtgcctgacataatgtgctcacaaatggctgggcgtggtggctaacgcctgtaatcccagcactttgggaggccaaggcgggtggatcacttgaggccaggagttcgagactagcctggccaacacggtgaaaccccgtctctactaaaaatacaaaacttagccaggtgtggtggcacacgcctgtaatcccagctacctgggaggccaaggcatgagaatcacttgaacctgggagatggacgttgcagtgagtcaagaaggtgccactgcactccagcctgggcaacagagcaagactctgtctcaaaaacaacagcagcagcagcagcagcaacaacaacaacaaatgaaagctattattaatactcatagcccaaaatccaaacctgccctctcaatctttttatgcatattattttacctctcatagcacactaatctcttgtaaattttttcagcaccctacctgggtccctcatacagtcttggaagtgtagttagtgagcacctgacacaatgctttaaaaatggcaggggcccaaatttgctgaacacatctgtcattattatgacattaagatacacatgcaatacgaattccaaaaaataaaacaaaaacataccatatttcgccaaacttctgaggagctggtgaattctaaaatcaggctcttacagatttttaacctaaaatataaaacacctcactcaattctttttacataaacaactggatgaactttcaaaaaaaaaggtactaaatttcatcataaaggcaaatttattttctataattatgaacatccaaaaacgtatcaagaaacaaattactgctgttgccgggatgaggaaagcataggtaggcaggccctgtggcctgagtgctttcagcaggcaaagccatatttcccatattcatccataaagcttagtgccttctatttatttactctatcctccctccaaaagggctaaacacatatgaaaactatttgactatatccctctaatcctttcaaatacctatagcaattttgtttttaattaaattctatatgctaagcatcggctatgttaggtacaaatctgggcatctaccactttctagagtagcagccttgggccgaccctctgacccttgagtctccaatgtcaggttattgtagcagagaaaatgcgttaaaaagttatagtataatgcctacctggcacaaaacaggacttcaatatacgacgataattataatttattaaatcaaccacttaatatatatcaaaacttaactcttaaaaaaaaatcctgaagcttaaagcaagcccctaaattatcactgtaaattcttaacttgtttgtatacaatcagaacattcctcaatggaacaaaaataaagtcctttcatgtactgcattacatataaagaaagcaaatctcaaaggttaagaaacctatccagtgtcctagaggttgatggtagaaagtgaatacactgcatataaaacattttgaaataaaattaaccaacttttaaggttttagagactgactttcaaacttcagtctataatagaattacctggggaaatctaaaaatgcaactacttgggctctactcgcaaagattttcattcagtgcatgaagtaggggtaaatgaattttttttttaatttttttcagaccaacccaagaacgcagaaatgaatttgcattttaacatatacttcacatgacacacagatctcattttaagaagccctgccttccaaattatgagttaggaacacataatcatggaggaaatataccaaatctataaaaatacagaataacaaaaactgtaagcactacaaatattaggcacactcacttgccaatttaaccataagaatcctaataccagacatagttctcttactttatctcttcaacagagggctcagtctaataatcttataaataagtatagtctaataataaatgcctatgttgatctatatctacctccctaaaattttcattttattcatttctatttttccttcacctccttctaaagctgtttcaaaacttaatttcacaaactgtttttttctatcactttttattataacacccaacacttctgttctcctttgcatcatgtttatggtgtcttatatttatggataatgctacttattaaaactgtctaagttttgtccgtttacacatttcacaattaaaggactactacaacaattttcctaagtcctcctgctttagtttctccttattccagtccattctgcagttaagacttaaaaagttttaaatactgctttcaaataatacttgcaacataattccctcaactccattagctcctcagagtaccatttctttatcttctttccttttactgccaaaaagacgtgaaaaccactagctcagctgctatttttctatctactgaaatttttcttgtaaagtttccatcatttctgtatattcccagtgctttggccccttaatcctacttaatttttgtagcttttaagactgctaatgactcctcacctcctctggcttccctaatgttgtatccactcattttcttccatctctctaaaggcaataaggtcttctgctagttcatcttcctacctcatacatggcctctctccaagtttctgtcaatagccacttttcttaacctaaaccaattttctgcgcaatgtcatccattcccatagcacctctatgcttacaaacccctaactctgtatctttaagtccttatgtctggcatggtatgcctgcaactacatattaccaacggtacacatccatttggatgtctcattaacatctacattcaacgtatctaatatcaaactcaattattttcccaaagaactcactctgcctaatctcactgtcctggttaaggactaaaaaaattggtgccattcattactttctccccctcatttttatttgccctaaccactgtgtaggttgatacttgttcagccttcaaattcttcataatcattaattcaaaaactgtctactagattttgagtgcctactaggtggatgaagatgcagaggtagaaaaactagacataatttcttgccctcatgtggtgaaggaaatgggcacaaataaaaaccacaattaattatgcaataacaatgcacagttaagtgttgtgatggagagatacagggggtgttaagttgtgtactgtaataaaaagtccttagtctgaagaaaaggaaaaccattctttatgagggacaagcaagatttacaagacacactaagaaaaaccctgtgaggtaatgatggtagcactatcagtccagctgctcaaattggaagattctcagtcatattctaaagagtctctctctttcccagtatatcaaattgtttaccaattgctaccaattcatccttagaaattcccctacatttctacattctcacattattccccagtcttttttgattgcttttagttgcttccagaataaagccaaagctcccaatcacgtcagatgagattctacacaatttggtcaaaacctgccagtgcagcctcttcttacagactagaccagacttcaagagaacatgtgtatcatttgcttttatacttccagtgcttgcaaatgtttatagaataagcatcttacaaaagagaaaatttttctcttagggaactagctttcagtcctttagtaaatgcaaggttaagattcaaaccctaatttgtctgattctaaagaccacgcttattcccttgtacttgccttctaatttatactcaaaccctatgaatttccttaaaaatatctcttactccttttttcctcaaacttaccaacactgtcctactacagtgccccattatttcatctggtttcccttttgcctttatcctcaactttgccactagaattatcttcctaaaaactcaaagttacacatatcattctatattcaaaagctttaacactttctcatgccaacagaataaatttctaactccttcacattttatttgaggcccctgccatgtggccctgaccccagccatcccagcactactgcccactatatgacatcatcaccagttaccagatctagtcccatcatttgactattggctataatgtactggatatttgtgtttctgacttcaatgcttttgcttctgaggagacttcactcggaaatggtcctctatccattactaacctctatcccccacccacctatcatgccatgttaaaaactggcctcattctaaacactgtatctcacagggttatctaaactcttatacataatcaccatctccttcatgtcttattatacattcttaataccataaaataatttattaatttctccttatatttattatgttataccttacattacagctatctgtatacatttgtcagtgcctctagttgtaagctgattgatggtagggatcatctcttccatattttacttttcgtaataatggtgactatgttttcttgacaccatacctcccctctacaagaaaaaaaaaaaaaaaaaaaaggaatcaggacccatggcctttgagctagttccaaatgtgactcatagatgaacaaagataccatttcttcccaaattaacacaaatataagtaaatgccaatttaagaaacgttttttcaaagactaaatatgtaagaataaccaaaacaattgtttctaataatgttcctttctctaccagatattaaaacatattaacttaaatggaataattaaaatcggcatgcctttaaaaaactgagtatacactaaatatatgcataccttatgacttaaaaatttcactcttaagtataccaaacagaagtaaacatattcacaagaagacaatcactgaaatgtttagagcagcagcaatattcttaacagttccaaaccaaaaatgattaaatgtccgtaacagcagattaaactatggcatattcttaaaatggaatatcacttccattcttaaaatggaatatacagcgactatcataaacaattactacaaccaacaatgtgaataaatctcacaaatacattaaaagaagtcagacacaactaaatgtgcttgattctagttaaaggatgaaaacaggcaaatctaatctatgctatgagaagtcaggacagtggttacacatggaagaaaaggggtagtgacacagagcacaaggggctacgcaggagctgctgctgttttttgatctgaatgctagctaaacgggtgctcagtgtgtgaaagtgcaacaagctatacacttagaagtgtatagcttaaaacattctaaaaaaaaaaaaaaaaacctcatatggtattagcattagacaaagaggtaagcacaacaagcacaacagaaagctaatttcagagaaagatccgaaagtatctgacagttgctccttctcaaacgagaattttcagaccttggataacaggcagcagaggactataatgcatgaaaggacaaaaacaaaggaggtgagccatccactgcttggatgtctgcctggaggtaatttccaacctgcagtcaatggaggggaaatccagtgagaagacagcagttttactgagttcagaatcaagagatcagagctgagaaagctgaagtgggtaaaattgatgacaagtgccagacaagtgcttgtctgagaaggcagagaaatggcttcagaaatctgccatttgagagtccactgctgagtactaactgtacacgattaaggtaagtgactccatgaagctagtgaaagaggggcagtaagctgaaatattcccagtacttataaaggactgggagactcctaaaattctctctaacctgagtgaagagaacacggtgacactgggagcatttagtaaagactcagaaggatcatgccttaggtaggagctactaccattaaagcaaagccttctctagacaaactccaatgtagccctgaagggataaaactgaccagcaagttatttaggtggctacaaaacaaaacactctaaaagaaaacaaaatctagacacccaacaacaaaatattacaatgtccagcatccaatcttaaaaaatcattaaatatgtaaaaaacaaaaaataaaataaaataaatactaggaaaatacaacccatgaccaagagaaaaaaccaaccaacaaattcagagtgaaaaaattcaagaaatcaataagtaacctgattttcaaacagctattacaaatatgctcaagaattcaaaaaaatacatgaataaaatgaatcaaatggaatttcttgaaatataaagcgaaatatctgaaattatttaacaagggaggagaaaaaacagtaaaatagaagacaaagcaaactgaagcacagggaaataaaaagactgaaaaataatgaatatgatgttaatgacctgtggataataccaaacagtctaacatatgtgtaactggagtcccagaaaaagaggaaatgatgaaagaggagtaaaggtggtaaaaaatatatatatagaagaaacaatggcaacaatcttccaaatttaaggaaaaccataaatgtacagattcaaaaagaaaaaaaaaacaaaaccccaacaactctcagcatggtaatcattgtgcaaatatcatagaacgtacttacacaaatctagattagatggtatagcttactacagaactaggatacatggtatagcccgggtgctcctaggttataaagctgtacagcatgttactatactgaatgaatactgtaagcaactgtaacaaagtgtaagtatttatacatctaaacctagaaaaggtacagtgaaaatatggtggtataatcttaaatgactattgtcaactatgatctcgttgactgaaatgtcagcatgcggcacatgactgtataaccagacttctcatcaaaaacaaatgctgaaagaaaaacacatcaactaaccaagaaaaaagaaacatatatgtccacacagagacttctttttttacacaaatgttcattgtacctttttataatagctgggaactgaaaacagcctggaactgaaaacagcccaggtgtcccttaacagatgaagtcacaaaccaccgaaacattcaacaatatggatgaatctcaaaaacattatgttgagcaaaaagaaactttttacaacatataagtattgtatgactctacttacataaagttctgcgcaagctaaactaagatgaaaacaatctgaacaatgttaggttctaggggtggtgtggggggaaggaataactaggaagaggtgtaggttctataccctgatagaactttctggcaaaggtgtatacatttgtcacagctcatgaaatggtatatgtggtcaactgtattttccaaagatggtcacaatagaagccattccacatgctcttaacaatgtaacactgtcattttttcatcaggtggtggagtctatggcccttctccttgaatctgagtgaaattagtgagtctttcaatccaaagactacagtcatacctcaactatctacagaggactggttccaggactcccatggatcccaaaatccaaggatgcttcgaatcccttatataaaatggcatggtatttgcatataacctacatgcatcttcaaatatgttaaaccatctctagattacttataataccaaatacaatgtaatgctatgtaaacagttgttacaatgtattgtcaaagacaagctctccttgccaatccctgaccaaatgagagattcatgagcaaaataaatagttgctgatatttaaggcactaagtttggggcaatgtattacacagcaataaataactggaacagcatagtaaattctagttaaaaatactaaactactaagttttagttaacatacatgctcaagttaagggtgtggtatactaacaactgcaacttactttgaaaagcataaaaaaagacactagaagaagacaggatggatagatggacaagatagaagacaataacaaatagaacaaaatgttgtgaaattatattctacaattattttaaagtctgtgtggtttgaaaaattgtacgataaaatgaagagtgaaataaagacatttccatacaaacaaaagctgaaagattttgtagccagtagacctatactttagaaatgtttaagaaattttttcaagtaaaaggaaaataacaccagcaacaaacttggatctacaaaaaggaatctccacaaagaaaaataaataaaaatggtaaatatgaaggtaaatataaaggaatgttattcttagtttttaagtttcttcgtaagacaactggcctttgaaagaaatagtttcaaacgctgctgtggaatctataacacatatagaagtaaaatgttaagatcataataccaaaaagaatgagggagagtaaatggatgtatactattccaaaattcttacattatacattaagaggaataatatttttgaaggtagattgaggtaagttaaaggtgcatattgtaaatcctagaagtatcactggggggaaaaaaaacagagggacaagctaataatggagacaatacaaaattccaaaaatgctccattaaccgaaaagaaggcagaaaaggaagaaaagattagacaaatagaaaacaaatagtgtcttaaacacaattatattgccaactgcaataaatgtaaatggacttaatcaaaaag

SEQ ID NO: 2916 - RNA, 1116 nt, Homo sapiens
  source 1..1116: mol_type = mRNA
tggcatccagtccactttaccatcagtgtttaaggaaaccatctctgataaggatgactgaggaagagtactctttggcttgttgacaccagcacagctgacacacccagatatctgtttggtctcctgtgaactttcaaccaggatttaaggatgccactctggttaaaagctgaaacaacttcaaggaaacttcagggaaaagagaaggcctggaatctgatcctccacttcagagaacagggagaaaaaagtgcatgtgaaatactactacttatccatctcctggctctgagcagtacatgtcaggaacaagagggaattgtagctggaagacagtagaagagccataggacaagtctctaagagaaggaagaaaaggcgcaatgaaagaaaacaagtttaagatagtagaaaagcattcaaagacggcaacctgaggtggtggagtctatggcccttctccttgaatctgagtgaaattagtgagtctttcaatccaaagactacagtcatacctcaactatctacagaggactggttccaggactcccatggatcccaaaatccaaggatgcttcgaatcccttatataaaatggcatggtatttgcatataacctacatgcatcttcaaatatgttaaaccatctctagattacttataataccaaatacaatgtaatgctatgtaaacagttgttacaatgtattgtcaaagacaagctctccttgccaatccctgaccaaatgagagattcatgagcaaaataaatagttgctgatatttaaggcactaagtttggggcaatgtattacacagcaataaataactggaacagcatagtaaattctagttaaaaatactaaactactaagttttagttaacatacatgctcaagttaagggtgtggtatactaacaactgcaacttactttgaaaagcataaaaaaagacactagaagaagacaggatggatagatggacaagatagaagacaataacaaatagaacaaaatgttgtgaaattatattctacaattattttaaagtctgtgtggtttgaaaaattgtacgataaaatgaagagtgaaataaagacatttccatacaaa

SEQ ID NO: 2917 - DNA, 20 bp, synthetic construct
  source 1..20: mol_type = other DNA
  modified_base 1: mod_base = OTHER; note = 2'-O-methoxyethyl 5-methylcytidine 3'-phosphorothioate
  modified_base 2: mod_base = OTHER; note = 2'-O-methoxyethyl adenosine 3'-phosphodiester
  modified_base 3: mod_base = OTHER; note = 2'-O-methoxyethyl thymidine 3'-phosphodiester
  modified_base 4: mod_base = OTHER; note = 2'-O-methoxyethyl 5-methylcytidine 3'-phosphodiester
  modified_base 5: mod_base = OTHER; note = 2'-O-methoxyethyl adenosine 3'-phosphodiester
  modified_base 6: mod_base = OTHER; note = 2'-deoxythymidine 3'-phosphorothioate
  modified_base 7: mod_base = OTHER; note = 2'-deoxyguanosine 3'-phosphorothioate
  modified_base 8: mod_base = OTHER; note = 2'-deoxyadenosine 3'-phosphorothioate
  modified_base 9: mod_base = OTHER; note = 2'-deoxythymidine 3'-phosphorothioate
  modified_base 10: mod_base = OTHER; note = 5-methyl-2'-deoxycytidine 3'-phosphorothioate
  modified_base 11..12: mod_base = OTHER; note = 2'-deoxythymidine 3'-phosphorothioate
  modified_base 13..14: mod_base = OTHER; note = 2'-deoxyguanosine 3'-phosphorothioate
  modified_base 15: mod_base = OTHER; note = 2'-deoxythymidine 3'-phosphorothioate
  modified_base 16..17: mod_base = OTHER; note = 2'-O-methoxyethyl adenosine 3'-phosphodiester
  modified_base 18..19: mod_base = OTHER; note = 2'-O-methoxyethyl guanosine 3'-phosphorothioate
  modified_base 20: mod_base = OTHER; note = 2'-O-methoxyethyl 5-methylcytidine
catcatgatcttggtaaggc

SEQ ID NO: 2918 - DNA, 20 bp, synthetic construct
  source 1..20: mol_type = other DNA
  modified_base 1: mod_base = OTHER; note = 2'-O-methoxyethyl thymidine 3'-phosphorothioate
  modified_base 2: mod_base = OTHER; note = 2'-O-methoxyethyl 5-methylcytidine 3'-phosphodiester
  modified_base 3: mod_base = OTHER; note = 2'-O-methoxyethyl adenosine 3'-phosphodiester
  modified_base 5..6: mod_base = OTHER; note = 2'-O-methoxyethyl 5-methylcytidine 3'-phosphodiester
  modified_base 6: mod_base = OTHER; note = 2'-O-methoxyethyl adenosine 3'-phosphodiester
  modified_base 7..10: mod_base = OTHER; note = 2'-deoxythymidine 3'-phosphorothioate
  modified_base 11: mod_base = OTHER; note = 2'-deoxyguanosine 3'-phosphorothioate
  modified_base 12: mod_base = OTHER; note = 2'-deoxyadenosine 3'-phosphorothioate
  modified_base 13..14: mod_base = OTHER; note = 5-methyl-2'-deoxycytidine 3'-phosphorothioate
  modified_base 15..16: mod_base = OTHER; note = 2'-deoxythymidine 3'-phosphorothioate
  modified_base 17: mod_base = OTHER; note = 2'-O-methoxyethyl 5-methylcytidine 3'-phosphodiester
  modified_base 18..19: mod_base = OTHER; note = 2'-O-methoxyethyl thymidine 3'-phosphorothioate
  modified_base 20: mod_base = OTHER; note = 2'-O-methoxyethyl adenosine
tcaccattttgaccttctta

SEQ ID NO: 2919 - DNA, 20 bp, synthetic construct
  source 1..20: mol_type = other DNA
  modified_base 1: mod_base = OTHER; note = 2'-O-methoxyethyl thymidine 3'-phosphorothioate
  modified_base 2: mod_base = OTHER; note = 2'-O-methoxyethyl thymidine 3'-phosphodiester
  modified_base 3: mod_base = OTHER; note = 2'-O-methoxyethyl 5-methylcytidine 3'-phosphodiester
  modified_base 4: mod_base = OTHER; note = 2'-O-methoxyethyl adenosine 3'-phosphodiester
  modified_base 5..6: mod_base = OTHER; note = 2'-O-methoxyethyl 5-methylcytidine 3'-phosphodiester
  modified_base 7: mod_base = OTHER; note = 2'-deoxyadenosine 3'-phosphorothioate
  modified_base 8..11: mod_base = OTHER; note = 2'-deoxythymidine 3'-phosphorothioate
  modified_base 12: mod_base = OTHER; note = 2'-deoxyguanosine 3'-phosphorothioate
  modified_base 13: mod_base = OTHER; note = 2'-deoxyadenosine 3'-phosphorothioate
  modified_base 14..15: mod_base = OTHER; note = 5-methyl-2'-deoxycytidine 3'-phosphorothioate
  modified_base 16: mod_base = OTHER; note = 2'-deoxythymidine 3'-phosphorothioate
  modified_base 17: mod_base = OTHER; note = 2'-O-methoxyethyl thymidine 3'-phosphodiester
  modified_base 18: mod_base = OTHER; note = 2'-O-methoxyethyl 5-methylcytidine 3'-phosphorothioate
  modified_base 19: mod_base = OTHER; note = 2'-O-methoxyethyl thymidine 3'-phosphorothioate
  modified_base 20: mod_base = OTHER; note = 2'-O-methoxyethyl thymidine
ttcaccattttgaccttctt

SEQ ID NO: 2920 - DNA, 20 bp, synthetic construct
  source 1..20: mol_type = other DNA
  modified_base 1: mod_base = OTHER; note = 2'-O-methoxyethyl guanosine 3'-phosphorothioate
  modified_base 2: mod_base = OTHER; note = 2'-O-methoxyethyl 5-methylcytidine 3'-phosphodiester
  modified_base 3: mod_base = OTHER; note = 2'-O-methoxyethyl adenosine 3'-phosphodiester
  modified_base 4: mod_base = OTHER; note = 2'-O-methoxyethyl thymidine 3'-phosphodiester
  modified_base 5: mod_base = OTHER; note = 2'-O-methoxyethyl adenosine 3'-phosphodiester
  modified_base 6: mod_base = OTHER; note = 2'-O-methoxyethyl 5-methylcytidine 3'-phosphodiester
  modified_base 7..8: mod_base = OTHER; note = 5-methyl-2'-deoxycytidine 3'-phosphorothioate
  modified_base 9: mod_base = OTHER; note = 2'-deoxyadenosine 3'-phosphorothioate
  modified_base 10..12: mod_base = OTHER; note = 2'-deoxyguanosine 3'-phosphorothioate
  modified_base 13: mod_base = OTHER; note = 2'-deoxythymidine 3'-phosphorothioate
  modified_base 14: mod_base = OTHER; note = 2'-deoxyadenosine 3'-phosphorothioate
  modified_base 15..16: mod_base = OTHER; note = 2'-deoxyguanosine 3'-phosphorothioate
  modified_base 17: mod_base = OTHER; note = 2'-O-methoxyethyl adenosine 3'-phosphodiester
  modified_base 18..19: mod_base = OTHER; note = 2'-O-methoxyethyl thymidine 3'-phosphorothioate
  modified_base 20: mod_base = OTHER; note = 2'-O-methoxyethyl 5-methylcytidine
gcatacccagggtaggattc

SEQ ID NO: 2921 - DNA, 18 bp, synthetic construct
  source 1..18: mol_type = other DNA
  modified_base 1: mod_base = OTHER; note = 2'-O-methoxyethyl adenosine 3'-phosphorothioate
  modified_base 2: mod_base = OTHER; note = 2'-O-methoxyethyl 5-methylcytidine 3'-phosphodiester
  modified_base 3: mod_base = OTHER; note = 2'-O-methoxyethyl guanosine 3'-phosphodiester
  modified_base 4: mod_base = OTHER; note = 2'-O-methoxyethyl 5-methylcytidine 3'-phosphorothioate
  modified_base 5..6: mod_base = OTHER; note = 2'-deoxyadenosine 3'-phosphorothioate
  modified_base 7: mod_base = OTHER; note = 2'-deoxythymidine 3'-phosphorothioate
  modified_base 8: mod_base = OTHER; note = 2'-deoxyguanosine 3'-phosphorothioate
  modified_base 9: mod_base = OTHER; note = 2'-deoxythymidine 3'-phosphorothioate
  modified_base 10: mod_base = OTHER; note = 2'-deoxyadenosine 3'-phosphorothioate
  modified_base 11: mod_base = OTHER; note = 2'-deoxythymidine 3'-phosphorothioate
  modified_base 12: mod_base = OTHER; note = 5-methyl-2'-deoxycytidine 3'-phosphorothioate
  modified_base 13: mod_base = OTHER; note = 2'-O-methoxyethyl adenosine 3'-phosphodiester
  modified_base 14..15: mod_base = OTHER; note = 2'-O-methoxyethyl guanosine 3'-phosphodiester
  modified_base 16: mod_base = OTHER; note = 2'-O-methoxyethyl 5-methylcytidine 3'-phosphorothioate
  modified_base 17: mod_base = OTHER; note = 2'-O-methoxyethyl adenosine 3'-phosphorothioate
  modified_base 18: mod_base = OTHER; note = 2'-O-methoxyethyl adenosine
acgcaatgtatcaggcaa

SEQ ID NO: 2922 - DNA, 20 bp, synthetic construct
  source 1..20: mol_type = other DNA
  modified_base 1: mod_base = OTHER; note = 2'-O-methoxyethyl adenosine 3'-phosphorothioate
  modified_base 2..3: mod_base = OTHER; note = 2'-O-methoxyethyl 5-methylcytidine 3'-phosphodiester
  modified_base 4: mod_base = OTHER; note = 2'-O-methoxyethyl adenosine 3'-phosphodiester
  modified_base 5: mod_base = OTHER; note = 2'-O-methoxyethyl thymidine 3'-phosphodiester
  modified_base 6..8: mod_base = OTHER; note = 2'-deoxythymidine 3'-phosphorothioate
  modified_base 9: mod_base = OTHER; note = 2'-deoxyguanosine 3'-phosphorothioate
  modified_base 10: mod_base = OTHER; note = 2'-deoxyadenosine 3'-phosphorothioate
  modified_base 11..12: mod_base = OTHER; note = 5-methyl-2'-deoxycytidine 3'-phosphorothioate
  modified_base 13..14: mod_base = OTHER; note = 2'-deoxythymidine 3'-phosphorothioate
  modified_base 15: mod_base = OTHER; note = 5-methyl-2'-deoxycytidine 3'-phosphorothioate
  modified_base 16..17: mod_base = OTHER; note = 2'-O-methoxyethyl thymidine 3'-phosphodiester
  modified_base 18: mod_base = OTHER; note = 2'-O-methoxyethyl adenosine 3'-phosphorothioate
  modified_base 19: mod_base = OTHER; note = 2'-O-methoxyethyl guanosine 3'-phosphorothioate
  modified_base 20: mod_base = OTHER; note = 2'-O-methoxyethyl 5-methylcytidine
accattttgaccttcttagc

SEQ ID NO: 2923 - DNA, 20 bp, synthetic construct
  source 1..20: mol_type = other DNA
  modified_base 1..2: mod_base = OTHER; note = locked nucleic acid adenosine 3'-phosphorothioate
  modified_base 3: mod_base = OTHER; note = 2'-deoxyadenosine 3'-phosphorothioate
  modified_base 4: mod_base = OTHER; note = 2'-deoxythymidine 3'-phosphorothioate
  modified_base 5: mod_base = OTHER; note = locked nucleic acid thymidine 3'-phosphorothioate
  modified_base 6: mod_base = OTHER; note = 2'-deoxyadenosine 3'-phosphorothioate
  modified_base 7: mod_base = OTHER; note = locked nucleic acid thymidine 3'-phosphorothioate
  modified_base 8..9: mod_base = OTHER; note = 2'-deoxythymidine 3'-phosphorothioate
  modified_base 10: mod_base = OTHER; note = 2'-deoxyadenosine 3'-phosphorothioate
  modified_base 11: mod_base = OTHER; note = 2'-deoxythymidine 3'-phosphorothioate
  modified_base 12: mod_base = OTHER; note = 2'-deoxyadenosine 3'-phosphorothioate
  modified_base 13: mod_base = OTHER; note = 5-methyl-2'-deoxycytidine 3'-phosphorothioate
  modified_base 14: mod_base = OTHER; note = 2'-deoxyadenosine 3'-phosphorothioate
  modified_base 15..16: mod_base = OTHER; note = 5-methyl-2'-deoxycytidine 3'-phosphorothioate
  modified_base 17: mod_base = OTHER; note = locked nucleic acid adenosine 3'-phosphorothioate
  modified_base 18: mod_base = OTHER; note = locked nucleic acid thymidine 3'-phosphorothioate
  modified_base 19: mod_base = OTHER; note = locked nucleic acid 5-methylcytidine 3'-phosphorothioate
  modified_base 20: mod_base = OTHER; note = locked nucleic acid adenosine
aaattatttatacaccatca

SEQ ID NO: 2924 - DNA, 18 bp, synthetic construct
  source 1..18: mol_type = other DNA
  modified_base 1..3: mod_base = OTHER; note = locked nucleic acid thymidine 3'-phosphorothioate
  modified_base 4: mod_base = OTHER; note = 2'-deoxyadenosine 3'-phosphorothioate
  modified_base 5: mod_base = OTHER; note = 2'-deoxythymidine 3'-phosphorothioate
  modified_base 6: mod_base = OTHER; note = locked nucleic acid 5-methylcytidine 3'-phosphorothioate
  modified_base 7..8: mod_base = OTHER; note = 2'-deoxyadenosine 3'-phosphorothioate
  modified_base 9: mod_base = OTHER; note = 2'-deoxythymidine 3'-phosphorothioate
  modified_base 10: mod_base = OTHER; note = 2'-deoxyadenosine 3'-phosphorothioate
  modified_base 11: mod_base = OTHER; note = 2'-deoxythymidine 3'-phosphorothioate
  modified_base 12: mod_base = OTHER; note = 5-methyl-2'-deoxycytidine 3'-phosphorothioate
  modified_base 13..14: mod_base = OTHER; note = 2'-deoxythymidine 3'-phosphorothioate
  modified_base 15: mod_base = OTHER; note = 5-methyl-2'-deoxycytidine 3'-phosphorothioate
  modified_base 16: mod_base = OTHER; note = locked nucleic acid thymidine 3'-phosphorothioate
  modified_base 17: mod_base = OTHER; note = locked nucleic acid 5-methylcytidine 3'-phosphorothioate
  modified_base 18: mod_base = OTHER; note = locked nucleic acid adenosine
tttatcaatatcttctca

SEQ ID NO: 2925 - DNA, 19 bp, synthetic construct
  source 1..19: mol_type = other DNA
  modified_base 1: mod_base = OTHER; note = locked nucleic acid guanosine 3'-phosphorothioate
  modified_base 2: mod_base = OTHER; note = 5-methyl-2'-deoxycytidine 3'-phosphorothioate
  modified_base 3: mod_base = OTHER; note = locked nucleic acid adenosine 3'-phosphorothioate
  modified_base 4: mod_base = OTHER; note = 5-methyl-2'-deoxycytidine 3'-phosphorothioate
  modified_base 5: mod_base = OTHER; note = locked nucleic acid adenosine 3'-phosphorothioate
  modified_base 6..7: mod_base = OTHER; note = 2'-deoxythymidine 3'-phosphorothioate
  modified_base 8: mod_base = OTHER; note = 5-methyl-2'-deoxycytidine 3'-phosphorothioate
  modified_base 9..11: mod_base = OTHER; note = 2'-deoxythymidine 3'-phosphorothioate
  modified_base 12: mod_base = OTHER; note = 5-methyl-2'-deoxycytidine 3'-phosphorothioate
  modified_base 13: mod_base = OTHER; note = 2'-deoxythymidine 3'-phosphorothioate
  modified_base 14: mod_base = OTHER; note = 2'-deoxyadenosine 3'-phosphorothioate
  modified_base 15: mod_base = OTHER; note = 2'-deoxythymidine 3'-phosphorothioate
  modified_base 16: mod_base = OTHER; note = 2'-deoxyadenosine 3'-phosphorothioate
  modified_base 17: mod_base = OTHER; note = 5-methyl-2'-deoxycytidine 3'-phosphorothioate
  modified_base 18: mod_base = OTHER; note = locked nucleic acid 5-methylcytidine 3'-phosphorothioate
  modified_base 19: mod_base = OTHER; note = locked nucleic acid thymidine
gcacattctttctatacct

SEQ ID NO: 2926 - DNA, 17 bp, synthetic construct
  source 1..17: mol_type = other DNA
  modified_base 1..2: mod_base = OTHER; note = locked nucleic acid thymidine 3'-phosphorothioate
  modified_base 3: mod_base = OTHER; note = 2'-deoxyadenosine 3'-phosphorothioate
  modified_base 4: mod_base = OTHER; note = locked nucleic acid thymidine 3'-phosphorothioate
  modified_base 5: mod_base = OTHER; note = locked nucleic acid adenosine 3'-phosphorothioate
  modified_base 6: mod_base = OTHER; note = 2'-deoxyguanosine 3'-phosphorothioate
  modified_base 7..8: mod_base = OTHER; note = 5-methyl-2'-deoxycytidine 3'-phosphorothioate
  modified_base 9: mod_base = OTHER; note = 2'-deoxyadenosine 3'-phosphorothioate
  modified_base 10..11: mod_base = OTHER; note = 2'-deoxythymidine 3'-phosphorothioate
  modified_base 12: mod_base = OTHER; note = 5-methyl-2'-deoxycytidine 3'-phosphorothioate
  modified_base 13: mod_base = OTHER; note = 2'-deoxythymidine 3'-phosphorothioate
  modified_base 14: mod_base = OTHER; note = 2'-deoxyadenosine 3'-phosphorothioate
  modified_base 15: mod_base = OTHER; note = 2'-deoxythymidine 3'-phosphorothioate
  modified_base 16: mod_base = OTHER; note = locked nucleic acid 5-methylcytidine 3'-phosphorothioate
  modified_base 17: mod_base = OTHER; note = locked nucleic acid thymidine
ttatagccattctatct

SEQ ID NO: 2927 - DNA, 17 bp, synthetic construct
  source 1..17: mol_type = other DNA
  modified_base 1: mod_base = OTHER; note = locked nucleic acid 5-methylcytidine 3'-phosphorothioate
  modified_base 2: mod_base = OTHER; note = 2'-deoxythymidine 3'-phosphorothioate
  modified_base 3: mod_base = OTHER; note = locked nucleic acid 5-methylcytidine 3'-phosphorothioate
  modified_base 4..5: mod_base = OTHER; note = locked nucleic acid adenosine 3'-phosphorothioate
  modified_base 6: mod_base = OTHER; note = 2'-deoxyadenosine 3'-phosphorothioate
  modified_base 7: mod_base = OTHER; note = 2'-deoxyguanosine 3'-phosphorothioate
  modified_base 8: mod_base = OTHER; note = 2'-deoxyadenosine 3'-phosphorothioate
  modified_base 9: mod_base = OTHER; note = 2'-deoxythymidine 3'-phosphorothioate
  modified_base 10: mod_base = OTHER; note = 5-methyl-2'-deoxycytidine 3'-phosphorothioate
  modified_base 11: mod_base = OTHER; note = 2'-deoxyadenosine 3'-phosphorothioate
  modified_base 12..13: mod_base = OTHER; note = 2'-deoxythymidine 3'-phosphorothioate
  modified_base 14: mod_base = OTHER; note = locked nucleic acid 5-methylcytidine 3'-phosphorothioate
  modified_base 15: mod_base = OTHER; note = locked nucleic acid thymidine 3'-phosphorothioate
  modified_base 16: mod_base = OTHER; note = locked nucleic acid 5-methylcytidine 3'-phosphorothioate
  modified_base 17: mod_base = OTHER; note = locked nucleic acid adenosine
ctcaaagatcattctca

SEQ ID NO: 2928 - DNA, 20 bp, synthetic construct
  source 1..20: mol_type = other DNA
  modified_base 1: mod_base = OTHER; note = locked nucleic acid thymidine 3'-phosphorothioate
  modified_base 2: mod_base = OTHER; note = 2'-deoxythymidine 3'-phosphorothioate
  modified_base 3: mod_base = OTHER; note = locked nucleic acid adenosine 3'-phosphorothioate
  modified_base 4: mod_base = OTHER; note = 5-methyl-2'-deoxycytidine 3'-phosphorothioate
  modified_base 5: mod_base = OTHER; note = locked nucleic acid adenosine 3'-phosphorothioate
  modified_base 6: mod_base = OTHER; note = 5-methyl-2'-deoxycytidine 3'-phosphorothioate
  modified_base 7: mod_base = OTHER; note = locked nucleic acid thymidine 3'-phosphorothioate
  modified_base 8: mod_base = OTHER; note = 2'-deoxythymidine 3'-phosphorothioate
  modified_base 9..10: mod_base = OTHER; note = 2'-deoxyadenosine 3'-phosphorothioate
  modified_base 11..12: mod_base = OTHER; note = 2'-deoxythymidine 3'-phosphorothioate
  modified_base 13: mod_base = OTHER; note = 2'-deoxyadenosine 3'-phosphorothioate
  modified_base 14: mod_base = OTHER; note = 2'-deoxythymidine 3'-phosphorothioate
  modified_base 15: mod_base = OTHER; note = 2'-deoxyadenosine 3'-phosphorothioate
  modified_base 16: mod_base = OTHER; note = 5-methyl-2'-deoxycytidine 3'-phosphorothioate
  modified_base 17: mod_base = OTHER; note = locked nucleic acid thymidine 3'-phosphorothioate
  modified_base 18: mod_base = OTHER; note = 2'-deoxythymidine 3'-phosphorothioate
  modified_base 19: mod_base = OTHER; note = locked nucleic acid 5-methylcytidine 3'-phosphorothioate
  modified_base 20: mod_base = OTHER; note = locked nucleic acid 5-methylcytidine
ttacacttaattatacttcc

SEQ ID NO: 2929 - DNA, 18 bp, synthetic construct
  source 1..18: mol_type = other DNA
  modified_base 1: mod_base = OTHER; note = locked nucleic acid guanosine 3'-phosphorothioate
  modified_base 2..4: mod_base = OTHER; note = 2'-deoxythymidine 3'-phosphorothioate
  modified_base 5..6: mod_base = OTHER; note = 5-methyl-2'-deoxycytidine 3'-phosphorothioate
  modified_base 7: mod_base = OTHER; note = 2'-deoxyadenosine 3'-phosphorothioate
  modified_base 8: mod_base = OTHER; note = 2'-deoxythymidine 3'-phosphorothioate
  modified_base 9: mod_base = OTHER; note = 5-methyl-2'-deoxycytidine 3'-phosphorothioate
  modified_base 10: mod_base = OTHER; note = 2'-deoxythymidine 3'-phosphorothioate
  modified_base 11: mod_base = OTHER; note = 2'-deoxyadenosine 3'-phosphorothioate
  modified_base 12: mod_base = OTHER; note = 5-methyl-2'-deoxycytidine 3'-phosphorothioate
  modified_base 13: mod_base = OTHER; note = locked nucleic acid thymidine 3'-phosphorothioate
  modified_base 14: mod_base = OTHER; note = locked nucleic acid adenosine 3'-phosphorothioate
  modified_base 15: mod_base = OTHER; note = 2'-deoxythymidine 3'-phosphorothioate
  modified_base 16: mod_base = OTHER; note = locked nucleic acid thymidine 3'-phosphorothioate
  modified_base 17: mod_base = OTHER; note = locked nucleic acid adenosine 3'-phosphorothioate
  modified_base 18: mod_base = OTHER; note = locked nucleic acid adenosine
gtttccatctactattaa

SEQ ID NO: 2930 - DNA, 17 bp, synthetic construct
  source 1..17: mol_type = other DNA
  modified_base 1: mod_base = OTHER; note = locked nucleic acid 5-methylcytidine 3'-phosphorothioate
  modified_base 2: mod_base = OTHER; note = locked nucleic acid thymidine 3'-phosphorothioate
  modified_base 3: mod_base = OTHER; note = 2'-deoxyguanosine 3'-phosphorothioate
  modified_base 4: mod_base = OTHER; note = 2'-deoxythymidine 3'-phosphorothioate
  modified_base 5: mod_base = OTHER; note = locked nucleic acid adenosine 3'-phosphorothioate
  modified_base 6: mod_base = OTHER; note = 2'-deoxythymidine 3'-phosphorothioate
  modified_base 7: mod_base = OTHER; note = 2'-deoxyadenosine 3'-phosphorothioate
  modified_base 8: mod_base = OTHER; note = 5-methyl-2'-deoxycytidine 3'-phosphorothioate
  modified_base 9: mod_base = OTHER; note = 2'-deoxyadenosine 3'-phosphorothioate
  modified_base 10..11: mod_base = OTHER; note = 5-methyl-2'-deoxycytidine 3'-phosphorothioate
  modified_base 12: mod_base = OTHER; note = 2'-deoxyadenosine 3'-phosphorothioate
  modified_base 13: mod_base = OTHER; note = 2'-deoxythymidine 3'-phosphorothioate
  modified_base 14..15: mod_base = OTHER; note = 5-methyl-2'-deoxycytidine 3'-phosphorothioate
  modified_base 16: mod_base = OTHER; note = locked nucleic acid 5-methylcytidine 3'-phosphorothioate
  modified_base 17: mod_base = OTHER; note = locked nucleic acid adenosine
ctgtatacaccatccca

SEQ ID NO: 2931 - DNA, 17 bp, synthetic construct
  source 1..17: mol_type = other DNA
  modified_base 1: mod_base = OTHER; note = locked nucleic acid adenosine 3'-phosphorothioate
  modified_base 2: mod_base = OTHER; note = 2'-deoxyguanosine 3'-phosphorothioate
  modified_base 3: mod_base = OTHER; note = 2'-deoxythymidine 3'-phosphorothioate
  modified_base 4: mod_base = OTHER; note = locked nucleic acid thymidine 3'-phosphorothioate
  modified_base 5: mod_base = OTHER; note = locked nucleic acid 5-methylcytidine 3'-phosphorothioate
  modified_base 6: mod_base = OTHER; note = 2'-deoxythymidine 3'-phosphorothioate
  modified_base 7: mod_base = OTHER; note = 2'-deoxyadenosine 3'-phosphorothioate
  modified_base 8: mod_base = OTHER; note = 5-methyl-2'-deoxycytidine 3'-phosphorothioate
  modified_base 9: mod_base = OTHER; note = 2'-deoxythymidine 3'-phosphorothioate
  modified_base 10: mod_base = OTHER; note = 2'-deoxyadenosine 3'-phosphorothioate
  modified_base 11: mod_base = OTHER; note = 2'-deoxythymidine 3'-phosphorothioate
  modified_base 12: mod_base = OTHER; note = 2'-deoxyadenosine 3'-phosphorothioate
  modified_base 13: mod_base = OTHER; note = 5-methyl-2'-deoxycytidine 3'-phosphorothioate
  modified_base 14..16: mod_base = OTHER; note = locked nucleic acid thymidine 3'-phosphorothioate
  modified_base 17: mod_base = OTHER; note = locked nucleic acid 5-methylcytidine
agttctactatactttc

SEQ ID NO: 2932 - DNA, 20 bp, synthetic construct
  source 1..20: mol_type = other DNA
  modified_base 1: mod_base = OTHER; note = locked nucleic acid thymidine 3'-phosphorothioate
  modified_base 2: mod_base = OTHER; note = locked nucleic acid adenosine 3'-phosphorothioate
  modified_base 3: mod_base = OTHER; note = 2'-deoxythymidine 3'-phosphorothioate
  modified_base 4: mod_base = OTHER; note = 2'-deoxyadenosine 3'-phosphorothioate
  modified_base 5: mod_base = OTHER; note = locked nucleic acid 5-methylcytidine 3'-phosphorothioate
  modified_base 6: mod_base = OTHER; note = 5-methyl-2'-deoxycytidine 3'-phosphorothioate
  modified_base 7: mod_base = OTHER; note = locked nucleic acid thymidine 3'-phosphorothioate
  modified_base 8..9: mod_base = OTHER; note = 2'-deoxythymidine 3'-phosphorothioate
  modified_base 10: mod_base = OTHER; note = 5-methyl-2'-deoxycytidine 3'-phosphorothioate
  modified_base 11..13: mod_base = OTHER; note = 2'-deoxythymidine 3'-phosphorothioate
  modified_base 14..15: mod_base = OTHER; note = 2'-deoxyadenosine 3'-phosphorothioate
  modified_base 16..18: mod_base = OTHER; note = 5-methyl-2'-deoxycytidine 3'-phosphorothioate
  modified_base 19: mod_base = OTHER; note = locked nucleic acid thymidine 3'-phosphorothioate
  modified_base 20: mod_base = OTHER; note = locked nucleic acid thymidine
tatacctttctttaaccctt
